(19) United States
(12) Patent Application Publication
(10) Pub. No.: US 2024/0287518 A1
(43) Pub. Date: Aug. 29, 2024

(54) TREATMENT OF MTRES1 RELATED DISEASES AND DISORDERS

(71) Applicant: Empirico Inc., San Diego, CA (US)

(72) Inventors: Omri GOTTESMAN, San Diego, CA (US); Shannon BRUSE, San Diego, CA (US); Paul BUSKE, Madison, WI (US); Brian CAJES, San Diego, CA (US); David JAKUBOSKY, San Diego, CA (US); Sarah KLEINSTEIN, San Diego, CA (US); David LEWIS, Madison, WI (US); David ROZEMA, Cross Plains, WI (US); John VEKICH, San Diego, CA (US)

(21) Appl. No.: 18/568,758

(22) PCT Filed: Jun. 14, 2022
(86) PCT No.: PCT/US2022/033356

§ 371 Date: Dec. 8, 2023

Related U.S. Application Data
(60) Provisional application No. 63/211,379, filed on Jun. 16, 2021.

(51) Int. Cl. C12N 15/113; A61P 25/28

(52) U.S. Cl. CPC C12N 15/113; A61P 25/28; C12N 2310/14; C12N 2310/315; C12N 2310/321; C12N 2310/3231; C12N 2310/351

(57) ABSTRACT

Disclosed herein are compositions comprising an oligonucleotide that targets MTRES1. The oligonucleotide may include a small interfering RNA (siRNA) or an antisense oligonucleotide (ASO). Also provided herein are methods of treating conditions associated with MTRES1 gene mutations that include providing an oligonucleotide that targets MTRES1 in a subject.

### CROSS-REFERENCE

[0001] This application claims the benefit of U.S. Provisional Application No. 63/211,379, filed Jun. 16, 2021, which application is incorporated herein by reference in its entirety.

### BACKGROUND

[0002] Neurological disorders are a common problem, particularly in the older population. Improved therapeutics are needed for treating these disorders.

### SUMMARY

[0003] Described herein are compositions comprising an oligonucleotide that targets MTRES1. Described herein are compositions comprising an oligonucleotide that targets MTRES1 and when administered to a subject in an effective amount reduces a MTRES1 mRNA or protein level. Described herein are compositions comprising an oligonucleotide that targets MTRES1 and when administered to a subject in an effective amount decreases central nervous system (CNS) MTRES1. In some embodiments, the CNS MTRES1 decreased by about 10% or more, as compared to prior to administration. Disclosed herein, in some embodiments, are compositions comprising an oligonucleotide that targets MTRES1 and when administered to a subject in an effective amount increases cognitive function or slows cognitive decline. In some embodiments, the cognitive function is increased by about 10% or more, as compared to prior to administration. In some embodiments, the cognitive decline is slowed by about 10% or more, as compared to prior to administration. Disclosed herein, in some embodiments, are compositions comprising an oligonucleotide that targets MTRES1 and when administered to a subject in an effective amount decreases a marker of neurodegeneration. In some embodiments, the marker of neurodegeneration comprises a central nervous system (CNS) or cerebrospinal fluid (CSF) marker of neurodegeneration. In some embodiments, the marker of neurodegeneration comprises a measurement of central nervous system (CNS) amyloid plaques, CNS tau accumulation, cerebrospinal fluid (CSF) beta-amyloid 42, CSF tau, CSF phospho-tau, CSF or plasma neurofilament light chain (NfL), Lewy bodies, or CSF alpha-synuclein. In some embodiments, the marker of neurodegeneration is decreased by about 10% or more, as compared to prior to administration. Disclosed herein, in some embodiments, are compositions comprising an oligonucleotide that targets MTRES1 and when administered to a subject in an effective amount increases cognitive function. In some embodiments, the cognitive function is increased by about 10% or more, as compared to prior to administration. Disclosed herein, in some embodiments, are compositions comprising an oligonucleotide that targets MTRES1 and when administered to a subject in an effective amount decreases central nervous system (CNS) amyloid plaques, CNS tau accumulation, cerebrospinal fluid (CSF) beta-amyloid 42, CSF tau, CSF phospho-tau, Lewy bodies, or CSF alpha-synuclein. In some embodiments, the CNS amyloid plaques, CNS tau accumulation, CSF beta-amyloid 42, CSF tau, CSF phospho-tau, Lewy bodies, or CSF alpha-synuclein, is decreased by about 10% or more, as compared to prior to administration. In some embodiments, the oligonucleotide comprises a modified internucleoside linkage. In some embodiments, the modified internucleoside linkage comprises alkylphosphonate, phosphorothioate, methylphosphonate, phosphorodithioate, alkylphosphonothioate, phosphoramidate, carbamate, carbonate, phosphate triester, acetamidate, or carboxymethyl ester, or a combination thereof. In some embodiments, the modified internucleoside linkage comprises one or more phosphorothioate linkages. In some embodiments, the oligonucleotide comprises 1, 2, 3, 4, 5, 6, 7, 8, 9, 10, 11, 12, 13, 14, 15, 16, 17, 18, 19, or 20 modified internucleoside linkages. In some embodiments, the oligonucleotide comprises a modified nucleoside. In some embodiments, the modified nucleoside comprises a locked nucleic acid (LNA), hexitol nucleic acid (HLA), cyclohexene nucleic acid (CeNA), 2′-methoxyethyl, 2′-O-alkyl, 2′-O-allyl, 2′-O-allyl, 2′-fluoro, or 2′-deoxy, or a combination thereof. In some embodiments, the modified nucleoside comprises a LNA. In some embodiments, the modified nucleoside comprises a 2′,4′ constrained ethyl nucleic acid. In some embodiments, the modified nucleoside comprises a 2′-O-methyl nucleoside, 2′-deoxyfluoro nucleoside, 2′-O—N-methylacetamido (2′-O-NMA) nucleoside, a 2′-O-dimethylaminoethoxyethyl (2′-O-DMAEOE) nucleoside, 2′-O-aminopropyl (2′-O-AP)nucleoside, or 2′-ara-F, or a combination thereof. In some embodiments, the modified nucleoside comprises one or more 2′fluoro modified nucleosides. In some embodiments, the modified nucleoside comprises a 2′ O-alkyl modified nucleoside. In some embodiments, the oligonucleotide comprises 1, 2, 3, 4, 5, 6, 7, 8, 9, 10, 11, 12, 13, 14, 15, 16, 17, 18, 19, 20, or 21 modified nucleosides. In some embodiments, the oligonucleotide comprises a lipophilic moiety attached at a 3′ or 5′ terminus of the oligonucleotide. In some embodiments, the lipophilic moiety comprises cholesterol, retinoic acid, cholic acid, adamantane acetic acid, 1-pyrene butyric acid, dihydrotestosterone, 1,3-bis-O(hexadecyl)glycerol, geranyloxyhexyanol, hexadecylglycerol, borneol, menthol, 1,3-propanediol, heptadecyl, palmitic acid, myristic acid, 03-(oleoyl)lithocholic acid, 03-(oleoyl)cholenic acid, ibuprofen, naproxen, dimethoxytrityl, or phenoxazine. In some embodiments, the lipophilic moiety comprises a C4-C30 hydrocarbon chain. In some embodiments, the lipophilic moiety comprises a lipid. In some embodiments, the lipid comprises myristoyl, palmitoyl, stearoyl, lithocholoyl, docosanoyl, docosahexaenoyl, myristyl, palmityl stearyl, or α-tocopherol, or a combination thereof. In some embodiments, the oligonucleolide comprises a small interfering RNA (siRNA) comprising a sense strand and an antisense strand. In some embodiments, the sense strand is 12-30 nucleosides in length. In some embodiments, the antisense strand is 12-30 nucleosides in length. Disclosed herein, in some embodiments, are compositions comprising an oligonucleotide that inhibits the expression of MTRES1, wherein the oligonucleotide comprises an siRNA comprising a sense strand and an antisense strand, each strand is independently about 12-30 nucleosides in length, and at least one of the sense strand and the antisense strand comprises a nucleoside sequence comprising about 12-30 contiguous nucleosides of SEQ ID NO: 2443. In some embodiments, any one of the following is true with regard to the sense strand: all purines comprise 2′ fluoro modified purines, and all pyrimidines comprise a mixture of 2′ fluoro and 2′ methyl modified pyrimidines; all purines comprise 2′ methyl modified purines, and all pyrimidines comprise a mixture of 2′ fluoro and 2′ methyl modified pyrimidines; all purines comprise 2′ fluoro modified purines, and all pyrimidines comprise 2′ methyl modified pyrimidines; all pyrimidines comprise 2′ fluoro modified pyrimidines, and all purines comprise a mixture of 2′ fluoro and 2′ methyl modified purines; all pyrimidines comprise 2′ methyl modified pyrimidines, and all purines comprise a mixture of 2′ fluoro and 2′ methyl modified purines; or all pyrimidines comprise 2′ fluoro modified pyrimidines, and all purines comprise 2′ methyl modified purines. In some embodiments, the sense strand comprises any one of modification patterns 1S, 2S, 3S, 4S, 5S, 6S, 7S, 8S, 9S, 10S, 11S, 12S, 13S, 14S, 15S, 16S, 17S, 18S, 19S, 20S, 21S, 22S, 23S, 24S, 25S, 26S, 27S, 28S, 29S, 30S, 31S, or 32S. In some embodiments, any one of the following is true with regard to the antisense strand: all purines comprise 2′ fluoro modified purines, and all pyrimidines comprise a mixture of 2′ fluoro and 2′ methyl modified pyrimidines; all purines comprise 2′ methyl modified purines, and all pyrimidines comprise a mixture of 2′ fluoro and 2′ methyl modified pyrimidines; all purines comprise 2′ methyl modified purines, and all pyrimidines comprise 2′ fluoro modified pyrimidines; all pyrimidines comprise 2′ fluoro modified pyrimidines, and all purines comprise a mixture of 2′ fluoro and 2′ methyl modified purines; all pyrimidines comprise 2′ methyl modified pyrimidines, and all purines comprise a mixture of 2′ fluoro and 2′ methyl modified purines; or all pyrimidines comprise 2′ methyl modified pyrimidines, and all purines comprise 2′ fluoro modified purines. In some embodiments, the antisense strand comprises any one of modification patterns 1AS, 2AS, 3AS, 4AS, 5AS, 6AS, 7AS, 8AS, 9AS or 10AS. In some embodiments, the oligonucleotide comprises a phosphate at the 5′ end of the antisense strand. In some embodiments, the oligonucleotide comprises a phosphate mimic at the 5′ end of the antisense strand. In some embodiments, the phosphate mimic comprises a 5′-vinyl phosphonate (VP). In some embodiments, the sense strand comprises the nucleic acid sequence of any one of SEQ ID NOs: 1-1140, and the antisense strand comprises the nucleic acid sequence of any one of SEQ ID NOs: 1141-2280. In some embodiments, the oligonucleotide comprises an antisense oligonucleotide (ASO). In some embodiments, the ASO is 12-30 nucleosides in length. Disclosed herein, in some embodiments, are compositions comprising an oligonucleotide that inhibits the expression of MTRES1, wherein the oligonucleotide comprises an ASO about 12-30 nucleosides in length and a nucleoside sequence complementary to about 12-30 contiguous nucleosides of SEQ ID NO: 2443. Some embodiments include a pharmaceutically acceptable carrier. Disclosed herein, in some embodiments, are methods of treating a subject having a neurological disorder, comprising administering an effective amount of the composition to the subject. In some embodiments, the neurological disorder comprises dementia, Alzheimer's disease, delirium, cognitive decline, vascular dementia, or Parkinson's disease.

### BRIEF DESCRIPTION OF THE DRAWINGS

[0004] FIG. 1 is an image of a western blot of MTRES1 protein.

[0005] FIG. 2 is a plot quantifying MTRES1 western blot data.

[0006] FIG. 3 is a plot of MTRES1 mRNA blot data.

### DETAILED DESCRIPTION

[0007] Large-scale human genetic data can improve the success rate of pharmaceutical discovery and development. A Genome Wide Association Study (GWAS) may detect associations between genetic variants and traits in a population sample. A GWAS may enable better understanding of the biology of disease, and provide applicable treatments. A GWAS can utilize genotyping and/or sequencing data, and often involves an evaluation of millions of genetic variants that are relatively evenly distributed across the genome. The most common GWAS design is the case-control study, which involves comparing variant frequencies in cases versus controls. If a variant has a significantly different frequency in cases versus controls, that variant is said to be associated with disease. Association statistics that may be used in a GWAS are p-values, as a measure of statistical significance; odds ratios (OR), as a measure of effect size; or beta coefficients (beta), as a measure of effect size. Researchers often assume an additive genetic model and calculate an allelic odds ratio, which is the increased (or decreased) risk of disease conferred by each additional copy of an allele (compared to carrying no copies of that allele). An additional concept in design and interpretation of GWAS is that of linkage disequilibrium, which is the non-random association of alleles. The presence of linkage disequilibrium can obfuscate which variant is “causal.”

[0008] Functional annotation of variants and/or wet lab experimentation can identify the causal genetic variant identified via GWAS, and in many cases may lead to the identification of disease-causing genes. In particular, understanding the functional effect of a causal genetic variant (for example, loss of protein function, gain of protein function, increase in gene expression, or decrease in gene expression) may allow that variant to be used as a proxy for therapeutic modulation of the target gene, or to gain insight into potential therapeutic efficacy and safety of a therapeutic that modulates that target.

[0009] Identification of such gene-disease associations has provided insights into disease biology and may be used to identify novel therapeutic targets for the pharmaceutical industry. In order to translate the therapeutic insights derived from human genetics, disease biology in patients may be exogenously ‘programmed’ into replicating the observation from human genetics. There are several potential options for therapeutic modalities that may be brought to bear in translating therapeutic targets identified via human genetics into novel medicines. These may include well established therapeutic modalities such as small molecules and monoclonal antibodies, maturing modalities such as oligonucleotides, and emerging modalities such as gene therapy and gene editing. The choice of therapeutic modality can depend on several factors including the location of a target (for example, intracellular, extracellular, or secreted), a relevant tissue (for example, brain) and a relevant indication.

[0010] The MTRES1 gene is located on chromosome 6, and encodes mitochondrial transcription rescue factor 1 (MTRES1), also known as chromosome 6 open reading frame 203 (C6orf203). The MTRES1 gene may also be referred to as the C6orf203 gene. MTRES1 may include 240 amino acids and have a mass of about 28 kDa. MTRES1 may be expressed in neural cells. MTRES1 may be cytoplasmic or intracellular. MTRES1 may be localized in mitochondria within the cell. MTRES1 may be involved in mitochondrial transcription regulation. An example of a MTRES1 amino acid sequence, and further description of MTRES1 is included at uniprot.org under accession no. Q9P0P8 (last modified Oct. 1, 2000).

[0011] Here it is shown that loss of function MTRES1 variants may protect against neurological diseases. For example, a loss of function MTRES1 variant was associated with protective associations against Alzheimer's disease, family history of Alzheimer's disease, dementia, vascular dementia, anticholinesterase medication use, and delirium. Therefore, inhibition of MTRES1 may serve as a therapeutic for treatment of a neurological disorder such as dementia, Alzheimer's disease, delirium, cognitive decline, vascular dementia, or Parkinson's disease.

[0012] Disclosed herein are compositions comprising an oligonucleotide that targets MTRES1. Where inhibition or targeting of MTRES1 is disclosed, it is contemplated that some embodiments may include inhibiting or targeting a MTRES1 protein or MTRES1 RNA. For example, by inhibiting or targeting an RNA (e.g. mRNA) encoded by the MTRES1 gene using an oligonucleotide described herein, the MTRES1 protein may be inhibited or targeted as a result of there being less production of the MTRES1 protein by translation of the MTRES1 RNA; or a MTRES1 protein may be targeted or inhibited by an oligonucleotide that binds or interacts with a MTRES1 RNA and reduces production of the MTRES1 protein from the MTRES1 RNA. Thus, targeting MTRES1 may refer to binding a MTRES1 RNA and reducing MTRES1 RNA or protein levels. The oligonucleotide may include a small interfering RNA (siRNA) or an antisense oligonucleotide (ASO). Also provided herein are methods of treating a neurological disorder by providing an oligonucleotide that targets MTRES1 to a subject in need thereof.

### I. Compositions

[0013] Disclosed herein, in some embodiments, are compositions comprising an oligonucleotide. In some embodiments, the composition comprises an oligonucleotide that targets MTRES1. In some embodiments, the composition consists of an oligonucleotide that targets MTRES1. In some embodiments, the oligonucleotide reduces MTRES1 mRNA expression in the subject. In some embodiments, the oligonucleotide reduces MTRES1 protein expression in the subject. The oligonucleotide may include a small interfering RNA (siRNA) described herein. The oligonucleotide may include an antisense oligonucleotide (ASO) described herein. In some embodiments, a composition described herein is used in a method of treating a disorder in a subject in need thereof. Some embodiments relate to a composition comprising an oligonucleotide for use in a method of treating a disorder as described herein. Some embodiments relate to use of a composition comprising an oligonucleotide, in a method of treating a disorder as described herein.

[0014] Some embodiments include a composition comprising an oligonucleotide that targets MTRES1 and when administered to a subject in an effective amount decreases MTRES1 mRNA or protein levels in a cell, fluid or tissue. In some embodiments, the composition comprises an oligonucleotide that targets MTRES1 and when administered to a subject in an effective amount decreases MTRES1 mRNA levels in a cell or tissue. In some embodiments, the cell is a neural cell such as a central nervous system (CNS) cell. Some examples of CNS cells include neurons, glia, microglia, astrocytes, or oligodendrocytes. In some embodiments, the tissue is CNS or brain tissue. In some embodiments, the MTRES1 mRNA levels are decreased by about 2.5% or more, about 5% or more, or about 7.5% or more, as compared to prior to administration. In some embodiments, the MTRES1 mRNA levels are decreased by about 10% or more, as compared to prior to administration. In some embodiments, the MTRES1 mRNA levels are decreased by about 20% or more, about 30% or more, about 40% or more, about 50% or more, about 60% or more, about 70% or more, about 80% or more, about 90% or more, or about 100%, as compared to prior to administration. In some embodiments, the MTRES1 mRNA levels are decreased by no more than about 2.5%, no more than about 5%, or no more than about 7.5%, as compared to prior to administration. In some embodiments, the MTRES1 mRNA levels are decreased by no more than about 10%, as compared to prior to administration. In some embodiments, the MTRES1 mRNA levels are decreased by no more than about 20%, no more than about 30%, no more than about 40%, no more than about 50%, no more than about 60%, no more than about 70%, no more than about 80%, or no more than about 90%, as compared to prior to administration. In some embodiments, the MTRES1 mRNA levels are decreased by 2.5%, 5%, 7.5%, 10%, 1%, 20%, 25%, 30%, 35%, 40%, 45%, 50%, 55%, 60%, 65%, 70%, 75%, 80%, 85%, 90%, 95%, or 100%, or by a range defined by any of the two aforementioned percentages.

[0015] In some embodiments, the composition comprises an oligonucleotide that targets MTRES1 and when administered to a subject in an effective amount decreases MTRES1 protein levels in a cell, fluid or tissue. In some embodiments, the cell is a neural cell such as a central nervous system (CNS) cell. Some examples of CNS cells include neurons, glia, microglia, astrocytes, or oligodendrocytes. In some embodiments, the tissue is CNS or brain tissue. In some embodiments, the MTRES1 protein levels are decreased by about 2.5% or more, about 5% or more, or about 7.5% or more, as compared to prior to administration. In some embodiments, the MTRES1 protein levels are decreased by about 10% or more, as compared to prior to administration. In some embodiments, the MTRES1 protein levels are decreased by about 20% or more, about 30% or more, about 40% or more, about 50% or more, about 60% or more, about 70% or more, about 80% or more, about 90% or more, or about 100%, as compared to prior to administration. In some embodiments, the MTRES1 protein levels are decreased by no more than about 2.5%, no more than about 5%, or no more than about 7.5%, as compared to prior to administration. In some embodiments, the MTRES1 protein levels are decreased by no more than about 10%, as compared to prior to administration. In some embodiments, the MTRES1 protein levels are decreased by no more than about 20%, no more than about 30%, no more than about 40%, no more than about 50%, no more than about 60%, no more than about 70%, no more than about 80%, or no more than about 90%, as compared to prior to administration. In some embodiments, the MTRES1 protein levels are decreased by 2.5%, 5%, 7.5%, 10%, 15%, 20%, 25%, 30%, 35%, 40%, 45%, 50%, 55%, 60%, 65%, 70%, 75%, 80%, 85%, 90%, 95%, or 100%, or by a range defined by any of the two aforementioned percentages.

[0016] In some embodiments, the composition comprises an oligonucleotide that targets MTRES1 and when administered to a subject in an effective amount diminishes a neurological disorder phenotype. The neurological disorder disease may include dementia, Alzheimer's disease, delirium, cognitive decline, vascular dementia, or Parkinson's disease. In some embodiments, the neurological disorder phenotype is decreased by about 2.5% or more, about 5% or more, or about 7.5% or more, as compared to prior to administration. In some embodiments, the neurological disorder phenotype is decreased by about 10% or more, as compared to prior to administration. In some embodiments, the neurological disorder phenotype is decreased by about 20% or more, about 30% or more, about 40% or more, about 50% or more, about 60% or more, about 70% or more, about 80% or more, about 90% or more, or about 100%, as compared to prior to administration. In some embodiments, the neurological disorder phenotype is decreased by no more than about 2.5%, no more than about 5%, or no more than about 7.5%, as compared to prior to administration. In some embodiments, the neurological disorder phenotype is decreased by no more than about 10%, as compared to prior to administration. In some embodiments, the neurological disorder phenotype is decreased by no more than about 20%, no more than about 30%, no more than about 40%, no more than about 50%, no more than about 60%, no more than about 70%, no more than about 80%, or no more than about 90%, as compared to prior to administration. In some embodiments, the neurological disorder phenotype is decreased by 2.5%, 5%, 7.5%, 10%, 15%, 20%, 25%, 30%, 35%, 40%, 45%, 50%, 55%, 60%, 65%, 70%, 75%, 80%, 85%, 90%, 95%, or 100%, or by a range defined by any of the two aforementioned percentages.

[0017] In some embodiments, the composition comprises an oligonucleotide that targets MTRES1 and when administered to a subject in an effective amount enhances a protective phenotype against a neurological disorder in the subject. The neurological disorder may include dementia, Alzheimer's disease, delirium, cognitive decline, vascular dementia, or Parkinson's disease. In some embodiments, the protective phenotype is increased by about 2.5% or more, about 5% or more, or about 7.5% or more, as compared to prior to administration. In some embodiments, the protective phenotype is increased by about 10% or more, as compared to prior to administration. In some embodiments, the protective phenotype is increased by about 20% or more, about 30% or more, about 40% or more, about 50% or more, about 60% or more, about 70% or more, about 80% or more, about 90% or more, or about 100% or more, as compared to prior to administration. In some embodiments, the protective phenotype is increased by about 200% or more, about 300% or more, about 400% or more, about 500% or more, about 600% or more, about 700% or more, about 800% or more, about 900% or more, or about 1000% or more, as compared to prior to administration. In some embodiments, the protective phenotype is increased by no more than about 2.5%, no more than about 5%, or no more than about 7.5%, as compared to prior to administration. In some embodiments, the protective phenotype is increased by no more than about 10%, as compared to prior to administration. In some embodiments, the protective phenotype is increased by no more than about 20%, no more than about 30%, no more than about 40%, no more than about 50%, no more than about 60%, no more than about 70%, no more than about 80%, no more than about 90%, or no more than about 100%, as compared to prior to administration. In some embodiments, the protective phenotype is increased by no more than about 200%, no more than about 300%, no more than about 400%, no more than about 500%, no more than about 600%, no more than about 700%, no more than about 800%, no more than about 900%, or no more than about 1000%, as compared to prior to administration. In some embodiments, the protective phenotype is increased by 2.5%, 5%, 7.5%, 1, 1%, 20%, 25%, 30%, 35%, 40%, 45%, 50%, 55%, 60%, 65%, 70%, 75%, 80%, 85%, 90%, 95%, 100%, 150%, 200%, 250%, 300%, 400%, 500%, 600%, 700%, 800%, 900%, or 1000%, or by a range defined by any of the two aforementioned percentages.

[0018] In some embodiments, the composition comprises an oligonucleotide that targets MTRES1 and when administered to a subject in an effective amount decreases a marker of neurodegeneration in the subject. Some example markers of neurodegeneration may include central nervous system (CNS) amyloid plaques, CNS tau accumulation, cerebrospinal fluid (CSF) beta-amyloid 42, CSF tau, CSF phospho-tau, CSF or plasma neurofilament light chain (NfL), Lewy bodies, or CSF alpha-synuclein. In some embodiments, the marker of neurodegeneration is decreased by about 2.5% or more, about 5% or more, or about 7.5% or more, as compared to prior to administration. In some embodiments, the marker of neurodegeneration is decreased by about 10% or more, as compared to prior to administration. In some embodiments, the marker of neurodegeneration is decreased by about 20% or more, about 30% or more, about 40% or more, about 50% or more, about 60% or more, about 70% or more, about 80% or more, about 90% or more, or about 100%, as compared to prior to administration. In some embodiments, the marker of neurodegeneration is decreased by no more than about 2.5%, no more than about 5%, or no more than about 7.5%, as compared to prior to administration. In some embodiments, the marker of neurodegeneration is decreased by no more than about 10%, as compared to prior to administration. In some embodiments, the marker of neurodegeneration is decreased by no more than about 20%, no more than about 30%, no more than about 40%, no more than about 50%, no more than about 60%, no more than about 70%, no more than about 80%, or no more than about 90%, as compared to prior to administration. In some embodiments, the marker of neurodegeneration is decreased by 2.5%, 5%, 7.5%, 10%, 15%0, 20%, 25%, 30%, 35%, 40%, 45%, 50%, 55%, 60%, 65%, 70%, 75%, 80%, 85%, 90%, 95%, or 100%, or by a range defined by any of the two aforementioned percentages.

[0019] In some embodiments, the composition comprises an oligonucleotide that targets MTRES1 and when administered to a subject in an effective amount decreases central nervous system (CNS) amyloid plaques in the subject. In some embodiments, the CNS amyloid plaques are decreased by about 2.5% or more, about 5% or more, or about 7.5% or more, as compared to prior to administration. In some embodiments, the CNS amyloid plaques are decreased by about 10% or more, as compared to prior to administration. In some embodiments, the CNS amyloid plaques are decreased by about 20% or more, about 30% or more, about 40% or more, about 50% or more, about 60% or more, about 70% or more, about 80% or more, about 90% or more, or about 100%, as compared to prior to administration. In some embodiments, the CNS amyloid plaques are decreased by no more than about 2.5%, no more than about 5%, or no more than about 7.5%, as compared to prior to administration. In some embodiments, the CNS amyloid plaques are decreased by no more than about 10%, as compared to prior to administration. In some embodiments, the CNS amyloid plaques are decreased by no more than about 20%, no more than about 30%, no more than about 40%, no more than about 50%, no more than about 60%, no more than about 70%, no more than about 80%, or no more than about 90%, as compared to prior to administration. In some embodiments, the CNS amyloid plaques are decreased by 2.5%, 5%, 7.5%, 10%, 15%, 20%, 25%, 30%, 35%, 40%, 45%, 50%, 55%, 60%, 65%, 70%, 75%, 80%, 85%, 90%, 95%, or 100%, or by a range defined by any of the two aforementioned percentages.

[0020] In some embodiments, the composition comprises an oligonucleotide that targets MTRES1 and when administered to a subject in an effective amount decreases central nervous system (CNS) tau accumulation in the subject. In some embodiments, the CNS tau accumulation is decreased by about 2.5% or more, about 5% or more, or about 7.5% or more, as compared to prior to administration. In some embodiments, the CNS tau accumulation is decreased by about 10% or more, as compared to prior to administration. In some embodiments, the CNS tau accumulation is decreased by about 20% or more, about 30% or more, about 40% or more, about 50% or more, about 60% or more, about 70% or more, about 80% or more, about 90% or more, or about 100%, as compared to prior to administration. In some embodiments, the CNS tau accumulation is decreased by no more than about 2.5%, no more than about 5%, or no more than about 7.5%, as compared to prior to administration. In some embodiments, the CNS tau accumulation is decreased by no more than about 10%, as compared to prior to administration. In some embodiments, the CNS tau accumulation is decreased by no more than about 20%, no more than about 30%, no more than about 40%, no more than about 50%, no more than about 60%, no more than about 70%, no more than about 80%, or no more than about 90%, as compared to prior to administration. In some embodiments, the CNS tau accumulation is decreased by 2.5%, 5%, 7.5%, 10%, 15%, 20%, 25%, 30%, 35%, 40%, 45%, 50%, 55%, 60%, 6%, 70%, 75%, 80%, 85%, 90%, 95%, or 100%, or by a range defined by any of the two aforementioned percentages.

[0021] In some embodiments, the composition comprises an oligonucleotide that targets MTRES1 and when administered to a subject in an effective amount decreases cerebrospinal fluid (CSF) beta-amyloid 42 in the subject. In some embodiments, the CSF beta-amyloid 42 is decreased by about 2.5% or more, about 5% or more, or about 7.5% or more, as compared to prior to administration. In some embodiments, the CSF beta-amyloid 42 is decreased by about 10% or more, as compared to prior to administration. In some embodiments, the CSF beta-amyloid 42 is decreased by about 20% or more, about 30% or more, about 40% or more, about 50% or more, about 60% or more, about 70% or more, about 80% or more, about 90% or more, or about 100%, as compared to prior to administration. In some embodiments, the CSF beta-amyloid 42 is decreased by no more than about 2.5%, no more than about 5%, or no more than about 7.5%, as compared to prior to administration. In some embodiments, the CSF beta-amyloid 42 is decreased by no more than about 10%, as compared to prior to administration. In some embodiments, the CSF beta-amyloid 42 is decreased by no more than about 20%, no more than about 30%, no more than about 40%, no more than about 50%, no more than about 60%, no more than about 70%, no more than about 80%, or no more than about 90%, as compared to prior to administration. In some embodiments, the CSF beta-amyloid 42 is decreased by 2.5%, 5%, 7.5%, 10%, 15%, 20%, 25%, 30%, 35%, 40%, 45%, 50%, 55%, 60%, 65%, 70%, 75%, 80%, 85%, 90%, 95%, or 100%, or by a range defined by any of the two aforementioned percentages.

[0022] In some embodiments, the composition comprises an oligonucleotide that targets MTRES1 and when administered to a subject in an effective amount decreases cerebrospinal fluid (CSF) tau in the subject. In some embodiments, the CSF tau is decreased by about 2.5% or more, about 5% or more, or about 7.5% or more, as compared to prior to administration. In some embodiments, the CSF tau is decreased by about 10% or more, as compared to prior to administration. In some embodiments, the CSF tau is decreased by about 20% or more, about 30% or more, about 40% or more, about 50% or more, about 60% or more, about 70% or more, about 80% or more, about 90% or more, or about 100%, as compared to prior to administration. In some embodiments, the CSF tau is decreased by no more than about 2.5%, no more than about 5%, or no more than about 7.5%, as compared to prior to administration. In some embodiments, the CSF tau is decreased by no more than about 10%, as compared to prior to administration. In some embodiments, the CSF tau is decreased by no more than about 20%, no more than about 30%, no more than about 40%, no more than about 50%, no more than about 60%, no more than about 70%, no more than about 80%, or no more than about 90%, as compared to prior to administration. In some embodiments, the CSF tau is decreased by 2.5%, 5%, 7.5%, 10%, 15%, 20%, 25%, 30%, 35%, 40%, 45%, 50%, 55%, 60%, 65%, 70%, 75%, 80%, 85%, 90%, 95%, or 100%, or by a range defined by any of the two aforementioned percentages.

[0023] In some embodiments, the composition comprises an oligonucleotide that targets MTRES1 and when administered to a subject in an effective amount decreases cerebrospinal fluid (CSF) tau in the subject. In some embodiments, the CSF phospho-tau is decreased by about 2.5% or more, about 5% or more, or about 7.5% or more, as compared to prior to administration. In some embodiments, the CSF phospho-tau is decreased by about 10% or more, as compared to prior to administration. In some embodiments, the CSF phospho-tau is decreased by about 20% or more, about 30% or more, about 40% or more, about 50% or more, about 60% or more, about 70% or more, about 80% or more, about 90% or more, or about 100%, as compared to prior to administration. In some embodiments, the CSF phospho-tau is decreased by no more than about 2.5%, no more than about 5%, or no more than about 7.5%, as compared to prior to administration. In some embodiments, the CSF phospho-tau is decreased by no more than about 10%, as compared to prior to administration. In some embodiments, the CSF phospho-tau is decreased by no more than about 20%, no more than about 30%, no more than about 40%, no more than about 50%, no more than about 60%, no more than about 70%, no more than about 80%, or no more than about 90%, as compared to prior to administration. In some embodiments, the CSF phospho-tau is decreased by 2.5%, 5%, 7.5%, 10%, 15%, 20%, 25%, 30%, 35%, 40%, 45%, 50%, 55%, 60%, 65%, 70%, 75%, 80%, 85%, 90%, 95%, or 100%, or by a range defined by any of the two aforementioned percentages.

[0024] In some embodiments, the composition comprises an oligonucleotide that targets MTRES1 and when administered to a subject in an effective amount decreases cerebrospinal fluid (CSF) alpha-synuclein in the subject. In some embodiments, the CSF alpha-synuclein is decreased by about 2.5% or more, about 5% or more, or about 7.5% or more, as compared to prior to administration. In some embodiments, the CSF alpha-synuclein is decreased by about 10% or more, as compared to prior to administration. In some embodiments, the CSF alpha-synuclein is decreased by about 20% or more, about 30% or more, about 40% or more, about 50% or more, about 60% or more, about 70% or more, about 80% or more, about 90% or more, or about 100%, as compared to prior to administration. In some embodiments, the CSF alpha-synuclein is decreased by no more than about 2.5%, no more than about 5%, or no more than about 7.5%, as compared to prior to administration. In some embodiments, the CSF alpha-synuclein is decreased by no more than about 10%, as compared to prior to administration. In some embodiments, the CSF alpha-synuclein is decreased by no more than about 20%, no more than about 30%, no more than about 40%, no more than about 50%, no more than about 60%, no more than about 70%, no more than about 80%, or no more than about 90%, as compared to prior to administration. In some embodiments, the CSF alpha-synuclein is decreased by 2.5%, 5%, 7.5%, 1%, 15%, 20%, 25%, 30%, 35%, 40%, 45%, 50%, 55%, 60%, 65%, 70%, 75%, 80%, 85%, 90%, 95%, or 100%, or by a range defined by any of the two aforementioned percentages.

[0025] In some embodiments, the composition comprises an oligonucleotide that targets MTRES1 and when administered to a subject in an effective amount decreases Lewy bodies in the subject. In some embodiments, the Lewy bodies are decreased by about 2.5% or more, about 5% or more, or about 7.5% or more, as compared to prior to administration. In some embodiments, the Lewy bodies are decreased by about 10% or more, as compared to prior to administration. In some embodiments, the Lewy bodies are decreased by about 20% or more, about 30% or more, about 40% or more, about 50% or more, about 60⁰% or more, about 70% or more, about 80% or more, about 90% or more, or about 100%, as compared to prior to administration. In some embodiments, the Lewy bodies are decreased by no more than about 2.5%, no more than about 5%, or no more than about 7.5%, as compared to prior to administration. In some embodiments, the Lewy bodies are decreased by no more than about 10%, as compared to prior to administration. In some embodiments, the Lewy bodies are decreased by no more than about 20%, no more than about 30%, no more than about 40%, no more than about 50%, no more than about 60%, no more than about 70%, no more than about 80%, or no more than about 90%, as compared to prior to administration. In some embodiments, the Lewy bodies are decreased by 2.5%, 5%, 7.5%, 10%, 15%, 20%, 25%, 30%, 35%, 40%, 45%, 50%, 55%, 60%, 6%, 70%, 7%, 80%, 85%, 90%, 95%, or 100%, or by a range defined by any of the two aforementioned percentages.

[0026] In some embodiments, the composition comprises an oligonucleotide that targets MTRES1 and when administered to a subject in an effective amount increases cognitive function. In some embodiments, the cognitive function is increased by about 2.5% or more, about 5% or more, or about 7.5% or more, as compared to prior to administration. In some embodiments, the cognitive function is increased by about 10% or more, as compared to prior to administration. In some embodiments, the cognitive function is increased by about 20% or more, about 30% or more, about 40% or more, about 50% or more, about 60% or more, about 70% or more, about 80% or more, about 90% or more, or about 100% or more, as compared to prior to administration. In some embodiments, the cognitive function is increased by about 200% or more, about 300% or more, about 400% or more, about 500% or more, about 600% or more, about 700% or more, about 800% or more, about 900% or more, or about 1000% or more, as compared to prior to administration. In some embodiments, the cognitive function is increased by no more than about 2.5%, no more than about 5%, or no more than about 7.5%, as compared to prior to administration. In some embodiments, the cognitive function is increased by no more than about 10%, as compared to prior to administration. In some embodiments, the cognitive function is increased by no more than about 20%, no more than about 30%, no more than about 40%, no more than about 50%, no more than about 60%, no more than about 70%, no more than about 80%, no more than about 90%, or no more than about 100%, as compared to prior to administration. In some embodiments, the cognitive function is increased by no more than about 200%, no more than about 300%, no more than about 400%, no more than about 500%, no more than about 600%, no more than about 700%, no more than about 800%, no more than about 900%, or no more than about 1000%, as compared to prior to administration. In some embodiments, the cognitive function is increased by 2.5%, 5%, 7.5%, 10, 15%, 20%, 25%, 30%, 35%, 40%, 45%, 50%, 55%, 60%, 65%, 70%, 75%, 80%, 85%, 90%, 95%, 100%, 150%, 200%, 250%, 300%, 400%, 500%, 600%, 700%, 800%, 900%, or 1000%, or by a range defined by any of the two aforementioned percentages.

A. siRNAs

[0027] In some embodiments, the composition comprises an oligonucleotide that targets MTRES1, wherein the oligonucleotide comprises a small interfering RNA (siRNA). In some embodiments, the composition comprises an oligonucleotide that targets MTRES1, wherein the oligonucleotide comprises a small interfering RNA (siRNA) comprising a sense strand and an antisense strand.

[0028] In some embodiments, the composition comprises an oligonucleotide that inhibits the expression of MTRES1, wherein the oligonucleotide comprises an siRNA comprising a sense strand and an antisense strand, wherein the sense strand is 12-30 nucleosides in length. In some embodiments, the composition comprises a sense strange that is 10, 11, 12, 13, 14, 15, 16, 17, 18, 19, 20, 21, 22, 23, 24, 25, 26, 27, 28, 29, or 30 nucleosides in length, or a range defined by any of the two aforementioned numbers. The sense strand may be 14-30 nucleosides in length. In some embodiments, the composition comprises an antisense strand is 12-30 nucleosides in length. In some embodiments, the composition comprises an antisense strand that is 10, 11, 12, 13, 14, 15, 16, 17, 18, 19, 20, 21, 22, 23, 24, 25, 26, 27, 28, 29, or 30 nucleosides in length, or a range defined by any of the two aforementioned numbers. The antisense strand may be 14-30 nucleosides in length.

[0029] In some embodiments, the composition comprises an oligonucleotide that inhibits the expression of MTRES1, wherein the oligonucleotide comprises an siRNA comprising a sense strand and an antisense strand, each strand is independently about 12-30 nucleosides in length, and at least one of the sense strand and the antisense strand comprises a nucleoside sequence comprising about 12-30 contiguous nucleosides of a full-length human MTRES1 mRNA sequence such as SEQ ID NO: 2443. In some embodiments, at least one of the sense strand and the antisense strand comprise a nucleoside sequence comprising at least about 10, 11, 12, 13, 14, 15, 16, 17, 18, 19, 20, 21, 22, 23, 24, 25, 26, 27, 28, 29, 30, or more contiguous nucleosides of one of SEQ ID NO: 2443.

[0030] In some embodiments, the composition comprises an oligonucleotide that inhibits the expression of MTRES1, wherein the oligonucleotide comprises an siRNA comprising a sense strand and an antisense strand, each strand is independently about 12-30 nucleosides in length, and at least one of the sense strand and the antisense strand comprises a nucleoside sequence comprising about 12-30 contiguous nucleosides of a full-length human MTRES1 mRNA sequence such as SEQ ID NO: 2462. In some embodiments, at least one of the sense strand and the antisense strand comprise a nucleoside sequence comprising at least about 10, 11, 12, 13, 14, 15, 16, 17, 18, 19, 20, 21, 22, 23, 24, 25, 26, 27, 28, 29, 30, or more contiguous nucleosides of one of SEQ ID NO: 2462.

[0031] In some embodiments, the composition comprises an oligonucleotide that inhibits the expression of MTRES1, wherein the oligonucleotide comprises an siRNA comprising a sense strand and an antisense strand, wherein the sense strand and the antisense strand form a double-stranded RNA duplex. In some embodiments, the first base pair of the double-stranded RNA duplex is an AU base pair.

[0032] In some embodiments, the sense strand further comprises a 3′ overhang. In some embodiments, the 3′ overhang comprises 1, 2, 3, 4, 5, 6, 7, 8, 9, or 10 nucleosides, or a range of nucleotides defined by any two of the aforementioned numbers. In some embodiments, the 3′ overhang comprises 1, 2, or more nucleosides. In some embodiments, the 3′ overhang comprises 2 nucleosides. In some embodiments, the sense strand further comprises a 5′ overhang. In some embodiments, the 5′ overhang comprises 1, 2, 3, 4, 5, 6, 7, 8, 9, or 10 nucleosides, or a range of nucleotides defined by any two of the aforementioned numbers. In some embodiments, the 5′ overhang comprises 1, 2, or more nucleosides. In some embodiments, the 5′ overhang comprises 2 nucleosides.

[0033] In some embodiments, the antisense strand further comprises a 3′ overhang. In some embodiments, the 3′ overhang comprises 1, 2, 3, 4, 5, 6, 7, 8, 9, or 10 nucleosides, or a range of nucleotides defined by any two of the aforementioned numbers. In some embodiments, the 3′ overhang comprises 1, 2, or more nucleosides. In some embodiments, the 3′ overhang comprises 2 nucleosides. In some embodiments, the antisense strand further comprises a 5′ overhang. In some embodiments, the 5′ overhang comprises 1, 2, 3, 4, 5, 6, 7, 8, 9, or 10 nucleosides, or a range of nucleotides defined by any two of the aforementioned numbers. In some embodiments, the 5′ overhang comprises 1, 2, or more nucleosides. In some embodiments, the 5′ overhang comprises 2 nucleosides.

[0034] In some embodiments, the composition comprises an oligonucleotide that inhibits the expression of MTRES1, wherein the oligonucleotide comprises an siRNA comprising a sense strand and an antisense strand, wherein the siRNA binds with a 19mer in a human MTRES1 mRNA. In some embodiments, the siRNA binds with a 12mer, a 13mer, a 14mer, a 15mer, a 16mer, a 17mer, a 18mer, a 19mer, a 20mer, a 21mer, a 22mer, a 23mer, a 24mer, or a 25mer in a human MTRES1 mRNA.

[0035] In some embodiments, the composition comprises an oligonucleotide that inhibits the expression of MTRES1, wherein the oligonucleotide comprises an siRNA comprising a sense strand and an antisense strand, wherein the siRNA binds with a 17mer in a non-human primate MTRES1 mRNA. In some embodiments, the siRNA binds with a 12mer, a 13mer, a 14mer, a 15mer, a 16mer, a 17mer, a 18mer, a 19mer, a 20mer, a 21mer, a 22mer, a 23mer, a 24mer, or a 25mer in a non-human primate MTRES1 mRNA.

[0036] In some embodiments, the composition comprises an oligonucleotide that inhibits the expression of MTRES1, wherein the oligonucleotide comprises an siRNA comprising a sense strand and an antisense strand, wherein the siRNA binds with a human MTRES1 mRNA and less than or equal to 20 human off-targets, with no more than 2 mismatches in the antisense strand. In some embodiments, the siRNA binds with a human MTRES1 mRNA and less than or equal to 10 human off-targets, with no more than 2 mismatches in the antisense strand. In some embodiments, the siRNA binds with a human MTRES1 mRNA and less than or equal to 30 human off-targets, with no more than 2 mismatches in the antisense strand. In some embodiments, the siRNA binds with a human MTRES1 mRNA and less than or equal to 40 human off-targets, with no more than 2 mismatches in the antisense strand. In some embodiments, the siRNA binds with a human MTRES1 mRNA and less than or equal to 50 human off-targets, with no more than 2 mismatches in the antisense strand. In some embodiments, the siRNA binds with a human MTRES1 mRNA and less than or equal to 10 human off-targets, with no more than 3 mismatches in the antisense strand. In some embodiments, the siRNA binds with a human MTRES1 mRNA and less than or equal to 20 human off-targets, with no more than 3 mismatches in the antisense strand. In some embodiments, the siRNA binds with a human MTRES1 mRNA and less than or equal to 30 human off-targets, with no more than 3 mismatches in the antisense strand. In some embodiments, the siRNA binds with a human MTRES1 mRNA and less than or equal to 40 human off-targets, with no more than 3 mismatches in the antisense strand. In some embodiments, the siRNA binds with a human MTRES1 mRNA and less than or equal to 50 human off-targets, with no more than 3 mismatches in the antisense strand.

[0037] In some embodiments, the composition comprises an oligonucleotide that inhibits the expression of MTRES1, wherein the oligonucleotide comprises an siRNA comprising a sense strand and an antisense strand, siRNA binds with a human MTRES1 mRNA target site that does not harbor an SNP, with a minor allele frequency (MAF) greater or equal to 1% (pos. 2-18). In some embodiments, the MAF is greater or equal to about 2%, about 3%, about 4%, about 5%, about 6%, about 7%, about 8%, about 9%, about 10%, about 110, about 12%, about 13%, about 14%, about 15%, about 16%, about 17%, about 18%, about 19%, or about 20%.

[0038] In some embodiments, the composition comprises an oligonucleotide that inhibits the expression of MTRES1, wherein the oligonucleotide comprises an siRNA comprising a sense strand and an antisense strand, wherein the sense strand comprises a nucleoside sequence comprising or consisting of the sequence of any one of SEQ ID NOs: 1-1140, or a nucleic acid sequence thereof having 1 or 2 nucleoside substitutions, additions, or deletions. In some embodiments, the sense strand comprises a nucleoside sequence comprising or consisting of the sequence of any one of SEQ ID NOs: 1-1140, or a nucleic acid sequence thereof having 3 or 4 nucleoside substitutions, additions, or deletions. In some embodiments, the sense strand further comprises a 3′ overhang. In some embodiments, the 3′ overhang comprises 1, 2, 3, 4, 5, 6, 7, 8, 9, or 10 nucleosides, or a range of nucleotides defined by any two of the aforementioned numbers. In some embodiments, the 3′ overhang comprises 1, 2, or more nucleosides. In some embodiments, the 3′ overhang comprises 2 nucleosides. In some embodiments, the sense strand further comprises a 5′ overhang. In some embodiments, the 5′ overhang comprises 1, 2, 3, 4, 5, 6, 7, 8, 9, or 10 nucleosides, or a range of nucleotides defined by any two of the aforementioned numbers. In some embodiments, the 5′ overhang comprises 1, 2, or more nucleosides. In some embodiments, the 5′ overhang comprises 2 nucleosides. In some embodiments, the sense strand comprises a nucleoside sequence comprising or consisting of the sequence of any one of SEQ ID NOs: 1-1140, or a nucleic acid sequence thereof having 1 or 2 nucleoside additions at the 3′ end. In some embodiments, the composition comprises an oligonucleotide that inhibits the expression of MTRES1, wherein the oligonucleotide comprises an siRNA comprising a sense strand and an antisense strand, wherein the sense strand comprises a nucleoside sequence comprising or consisting of the sequence of any one of SEQ ID NOs: 1-1140.

[0039] In some embodiments, the composition comprises an oligonucleotide that inhibits the expression of MTRES1, wherein the oligonucleotide comprises an siRNA comprising a sense strand and an antisense strand, wherein the antisense strand comprises a nucleoside sequence comprising or consisting of the sequence of any one of SEQ ID NOs: 1141-2280, or a nucleic acid sequence thereof having 1 or 2 nucleoside substitutions, additions, or deletions. In some embodiments, the antisense strand sequence comprises a nucleoside sequence comprising or consisting of the sequence of any one of SEQ ID NOs: 1141-2280, or a nucleic acid sequence thereof having 3 or 4 nucleoside substitutions, additions, or deletions. In some embodiments, the antisense strand further comprises a 3′ overhang. In some embodiments, the 3′ overhang comprises 1, 2, 3, 4, 5, 6, 7, 8, 9, or 10 nucleosides, or a range of nucleotides defined by any two of the aforementioned numbers. In some embodiments, the 3′ overhang comprises 1, 2, or more nucleosides. In some embodiments, the 3′ overhang comprises 2 nucleosides. In some embodiments, the antisense strand further comprises a 5′ overhang. In some embodiments, the 5′ overhang comprises 1, 2, 3, 4, 5, 6, 7, 8, 9, or 10 nucleosides, or a range of nucleotides defined by any two of the aforementioned numbers. In some embodiments, the 5′ overhang comprises 1, 2, or more nucleosides. In some embodiments, the 5′ overhang comprises 2 nucleosides. In some embodiments, the antisense strand comprises a nucleoside sequence comprising or consisting of the sequence of any one of SEQ ID NOs: 1141-2280, or a nucleic acid sequence thereof having 1 or 2 nucleoside additions at the 3′ end. In some embodiments, the composition comprises an oligonucleotide that inhibits the expression of MTRES1, wherein the oligonucleotide comprises an siRNA comprising a sense strand and an antisense strand, wherein the antisense strand comprises a nucleoside sequence comprising or consisting of the sequence of any one of SEQ ID NOs: 1141-2280.

[0040] In some embodiments, the siRNA comprises the sense strand and/or the antisense strand sequence of an siRNA in any one of Tables 2-7, or a nucleic acid sequence thereof having 3 or 4 nucleoside substitutions, additions, or deletions. In some embodiments, the siRNA comprises the sense strand and/or the antisense strand sequence of an siRNA in any one of Tables 2-7, or a nucleic acid sequence thereof having 1 or 2 nucleoside substitutions, additions, or deletions. In some embodiments, the siRNA comprises the sense strand and/or the antisense strand sequence of an siRNA in any one of Tables 2-7. In some embodiments, the siRNA is cross-reactive with a non-human primate (NHP) MTRES1 mRNA. The siRNA may include one or more internucleoside linkages and/or one or more nucleoside modifications.

[0041] In some embodiments, the siRNA comprises the sense strand and/or the antisense strand sequence of an siRNA in Table 11B, or a nucleic acid sequence thereof having 3 or 4 nucleoside substitutions, additions, or deletions. In some embodiments, the siRNA comprises the sense strand and/or the antisense strand sequence of an siRNA in Table 11B, or a nucleic acid sequence thereof having 1 or 2 nucleoside substitutions, additions, or deletions. In some embodiments, the siRNA comprises the sense strand and/or the antisense strand sequence of an siRNA in Table 11B. In some embodiments, the siRNA is cross-reactive with a non-human primate (NHP) MTRES1 mRNA. The siRNA may include one or more internucleoside linkages and/or one or more nucleoside modifications. The siRNA may include a moiety such as a lipid moiety or a GalNAc moiety.

[0042] In some embodiments, the siRNA comprises the sense strand and/or the antisense strand sequence of an siRNA in Table 13B, or a nucleic acid sequence thereof having 3 or 4 nucleoside substitutions, additions, or deletions. In some embodiments, the siRNA comprises the sense strand and/or the antisense strand sequence of an siRNA in Table 13B, or a nucleic acid sequence thereof having 1 or 2 nucleoside substitutions, additions, or deletions. In some embodiments, the siRNA comprises the sense strand and/or the antisense strand sequence of an siRNA in Table 13B. In some embodiments, the siRNA is cross-reactive with a non-human primate (NHP) MTRES1 mRNA. The siRNA may include one or more internucleoside linkages and/or one or more nucleoside modifications. The siRNA may include a moiety such as a lipid moiety or a GalNAc moiety.

[0043] In some embodiments, the siRNA comprises the sense strand and/or the antisense strand sequence of an siRNA in Table 15B, or a nucleic acid sequence thereof having 3 or 4 nucleoside substitutions, additions, or deletions. In some embodiments, the siRNA comprises the sense strand and/or the antisense strand sequence of an siRNA in Table 15B, or a nucleic acid sequence thereof having 1 or 2 nucleoside substitutions, additions, or deletions. In some embodiments, the siRNA comprises the sense strand and/or the antisense strand sequence of an siRNA in Table 15B. In some embodiments, the siRNA is cross-reactive with a non-human primate (NHP) MTRES1 mRNA. The siRNA may include one or more internucleoside linkages and/or one or more nucleoside modifications. The siRNA may include a moiety such as a lipid moiety or a GalNAc moiety.

[0044] In some embodiments, the siRNA comprises the sense strand and/or the antisense strand sequence of an siRNA of subset A, or a nucleic acid sequence thereof having 3 or 4 nucleoside substitutions, additions, or deletions. In some embodiments, the siRNA comprises the sense strand and/or the antisense strand sequence of an siRNA of subset A, or a nucleic acid sequence thereof having 1 or 2 nucleoside substitutions, additions, or deletions. In some embodiments, the siRNA comprises the sense strand and/or the antisense strand sequence of an siRNA of subset A. In some embodiments, the siRNA is cross-reactive with a non-human primate (NHP) MTRES1 mRNA. The siRNA may include one or more internucleoside linkages and/or one or more nucleoside modifications.

[0045] In some embodiments, the siRNA comprises the sense strand and/or the antisense strand sequence of an siRNA of subset B, or a nucleic acid sequence thereof having 3 or 4 nucleoside substitutions, additions, or deletions. In some embodiments, the siRNA comprises the sense strand and/or the antisense strand sequence of an siRNA of subset B, or a nucleic acid sequence thereof having 1 or 2 nucleoside substitutions, additions, or deletions. In some embodiments, the siRNA comprises the sense strand and/or the antisense strand sequence of an siRNA of subset B. In some embodiments, the siRNA is cross-reactive with a non-human primate (NHP) MTRES1 mRNA. The siRNA may include one or more internucleoside linkages and/or one or more nucleoside modifications.

[0046] In some embodiments, the siRNA comprises the sense strand and/or the antisense strand sequence of an siRNA of subset C, or a nucleic acid sequence thereof having 3 or 4 nucleoside substitutions, additions, or deletions. In some embodiments, the siRNA comprises the sense strand and/or the antisense strand sequence of an siRNA of subset C, or a nucleic acid sequence thereof having 1 or 2 nucleoside substitutions, additions, or deletions. In some embodiments, the siRNA comprises the sense strand and/or the antisense strand sequence of an siRNA of subset C. In some embodiments, the siRNA is cross-reactive with a non-human primate (NHP) MTRES1 mRNA. The siRNA may include one or more internucleoside linkages and/or one or more nucleoside modifications.

[0047] In some embodiments, the siRNA comprises the sense strand and/or the antisense strand sequence of an siRNA of subset D, or a nucleic acid sequence thereof having 3 or 4 nucleoside substitutions, additions, or deletions. In some embodiments, the siRNA comprises the sense strand and/or the antisense strand sequence of an siRNA of subset D, or a nucleic acid sequence thereof having 1 or 2 nucleoside substitutions, additions, or deletions. In some embodiments, the siRNA comprises the sense strand and/or the antisense strand sequence of an siRNA of subset D. In some embodiments, the siRNA is cross-reactive with a non-human primate (NHP) MTRES1 mRNA. The siRNA may include one or more internucleoside linkages and/or one or more nucleoside modifications.

[0048] In some embodiments, the siRNA comprises the sense strand and/or the antisense strand sequence of an siRNA of subset E, or a nucleic acid sequence thereof having 3 or 4 nucleoside substitutions, additions, or deletions. In some embodiments, the siRNA comprises the sense strand and/or the antisense strand sequence of an siRNA of subset E, or a nucleic acid sequence thereof having 1 or 2 nucleoside substitutions, additions, or deletions. In some embodiments, the siRNA comprises the sense strand and/or the antisense strand sequence of an siRNA of subset E. In some embodiments, the siRNA is cross-reactive with a non-human primate (NHP) MTRES1 mRNA. The siRNA may include one or more internucleoside linkages and/or one or more nucleoside modifications.

[0049] In some embodiments, the siRNA comprises the sense strand and/or the antisense strand sequence of an siRNA of subset F, or a nucleic acid sequence thereof having 3 or 4 nucleoside substitutions, additions, or deletions. In some embodiments, the siRNA comprises the sense strand and/or the antisense strand sequence of an siRNA of subset F, or a nucleic acid sequence thereof having 1 or 2 nucleoside substitutions, additions, or deletions. In some embodiments, the siRNA comprises the sense strand and/or the antisense strand sequence of an siRNA of subset F. In some embodiments, the siRNA is cross-reactive with a non-human primate (NHP) MTRES1 mRNA. The siRNA may include one or more internucleoside linkages and/or one or more nucleoside modifications.

[0050] In some embodiments, the siRNA comprises a sense strand having a sequence in accordance with SEQ ID NO: 2576. In some embodiments, the sense strand sequence comprises or consists of sequence at least 75% identical to SEQ ID NO: 2576, at least 80% identical to SEQ ID NO: 2576, at least 85% identical to SEQ ID NO: 2576, at least 90% identical to SEQ ID NO: 2576, or at least 95% identical to SEQ ID NO: 2576. In some embodiments, the sense strand sequence comprises or consists of the sequence of SEQ ID NO: 2576, or a sense strand sequence thereof having 1, 2, 3, or 4 nucleoside substitutions, additions, or deletions. In some embodiments, the sense strand sequence comprises or consists of the sequence of SEQ ID NO: 2576, or a sense strand sequence thereof having 1 or 2 nucleoside substitutions, additions, or deletions. In some embodiments, the sense strand sequence comprises or consists of a sequence 100% identical to SEQ ID NO: 2576. The sense strand may comprise any modifications or modification pattern described herein. The sense strand may comprise a moiety such as a GalNAc moiety or a lipid moiety. In some embodiments, the siRNA comprises an antisense strand having a sequence in accordance with SEQ ID NO: 2638. In some embodiments, the antisense strand sequence comprises or consists of sequence at least 75% identical to SEQ ID NO: 2638, at least 80% identical to SEQ ID NO: 2638, at least 85% identical to SEQ ID NO: 2638, at least 90% identical to SEQ ID NO: 2638, or at least 95% identical to SEQ ID NO: 2638. In some embodiments, the antisense strand sequence comprises or consists of the sequence of SEQ ID NO 2638, or an antisense strand sequence thereof having 1, 2, 3, or 4 nucleoside substitutions, additions, or deletions. In some embodiments, the antisense strand sequence comprises or consists of the sequence of SEQ ID NO: 2638, or an antisense strand sequence thereof having 1 or 2 nucleoside substitutions, additions, or deletions. In some embodiments, the antisense strand sequence comprises or consists of a sequence 100% identical to SEQ ID NO: 2638. The antisense strand may comprise any modifications or modification pattern described herein. The antisense strand may comprise a moiety such as a GalNAc moiety or a lipid moiety.

[0051] In some embodiments, the siRNA comprises a sense strand having a sequence in accordance with SEQ ID NO: 2582. In some embodiments, the sense strand sequence comprises or consists of sequence at least 75% identical to SEQ ID NO: 2582, at least 80% identical to SEQ ID NO: 2582, at least 85% identical to SEQ ID NO: 2582, at least 90% identical to SEQ ID NO: 2582, or at least 95% identical to SEQ ID NO: 2582. In some embodiments, the sense strand sequence comprises or consists of the sequence of SEQ ID NO 2582, or a sense strand sequence thereof having 1, 2, 3, or 4 nucleoside substitutions, additions, or deletions. In some embodiments, the sense strand sequence comprises or consists of the sequence of SEQ ID NO: 2582, or a sense strand sequence thereof having 1 or 2 nucleoside substitutions, additions, or deletions. In some embodiments, the sense strand sequence comprises or consists of a sequence 100% identical to SEQ ID NO: 2582. The sense strand may comprise any modifications or modification pattern described herein. The sense strand may comprise a moiety such as a GalNAc moiety or a lipid moiety. In some embodiments, the siRNA comprises an antisense strand having a sequence in accordance with SEQ ID NO: 2644. In some embodiments, the antisense strand sequence comprises or consists of sequence at least 75% identical to SEQ ID NO: 2644, at least 80% identical to SEQ ID NO: 2644, at least 85% identical to SEQ ID NO: 2644, at least 90% identical to SEQ ID NO: 2644, or at least 95% identical to SEQ ID NO: 2644. In some embodiments, the antisense strand sequence comprises or consists of the sequence of SEQ ID NO 2644, or an antisense strand sequence thereof having 1, 2, 3, or 4 nucleoside substitutions, additions, or deletions. In some embodiments, the antisense strand sequence comprises or consists of the sequence of SEQ ID NO: 2644, or an antisense strand sequence thereof having 1 or 2 nucleoside substitutions, additions, or deletions. In some embodiments, the antisense strand sequence comprises or consists of a sequence 100% identical to SEQ ID NO: 2644. The antisense strand may comprise any modifications or modification pattern described herein. The antisense strand may comprise a moiety such as a GalNAc moiety or a lipid moiety.

[0052] In some embodiments, the siRNA comprises a sense strand having a sequence in accordance with SEQ ID NO: 2583. In some embodiments, the sense strand sequence comprises or consists of sequence at least 75% identical to SEQ ID NO: 2583, at least 80% identical to SEQ ID NO: 2583, at least 85% identical to SEQ ID NO: 2583, at least 90% identical to SEQ ID NO: 2583, or at least 95% identical to SEQ ID NO: 2583. In some embodiments, the sense strand sequence comprises or consists of the sequence of SEQ ID NO 2583, or a sense strand sequence thereof having 1, 2, 3, or 4 nucleoside substitutions, additions, or deletions. In some embodiments, the sense strand sequence comprises or consists of the sequence of SEQ ID NO: 2583, or a sense strand sequence thereof having 1 or 2 nucleoside substitutions, additions, or deletions. In some embodiments, the sense strand sequence comprises or consists of a sequence 100% identical to SEQ ID NO: 2583. The sense strand may comprise any modifications or modification pattern described herein. The sense strand may comprise a moiety such as a GalNAc moiety or a lipid moiety. In some embodiments, the siRNA comprises an antisense strand having a sequence in accordance with SEQ ID NO: 2645. In some embodiments, the antisense strand sequence comprises or consists of sequence at least 75% identical to SEQ ID NO: 2645, at least 80% identical to SEQ ID NO: 2645, at least 85% identical to SEQ ID NO: 2645, at least 90% identical to SEQ ID NO: 2645, or at least 95% identical to SEQ ID NO: 2645. In some embodiments, the antisense strand sequence comprises or consists of the sequence of SEQ ID NO 2645, or an antisense strand sequence thereof having 1, 2, 3, or 4 nucleoside substitutions, additions, or deletions. In some embodiments, the antisense strand sequence comprises or consists of the sequence of SEQ ID NO: 2645, or an antisense strand sequence thereof having 1 or 2 nucleoside substitutions, additions, or deletions. In some embodiments, the antisense strand sequence comprises or consists of a sequence 100% identical to SEQ ID NO: 2645. The antisense strand may comprise any modifications or modification pattern described herein. The antisense strand may comprise a moiety such as a GalNAc moiety or a lipid moiety.

[0053] In some embodiments, the siRNA comprises a sense strand having a sequence in accordance with SEQ ID NO: 2584. In some embodiments, the sense strand sequence comprises or consists of sequence at least 75% identical to SEQ ID NO: 2584, at least 80% identical to SEQ ID NO: 2584, at least 85% identical to SEQ ID NO: 2584, at least 90% identical to SEQ ID NO: 2584, or at least 95% identical to SEQ ID NO: 2584. In some embodiments, the sense strand sequence comprises or consists of the sequence of SEQ ID NO 2584, or a sense strand sequence thereof having 1, 2, 3, or 4 nucleoside substitutions, additions, or deletions. In some embodiments, the sense strand sequence comprises or consists of the sequence of SEQ ID NO: 2584, or a sense strand sequence thereof having 1 or 2 nucleoside substitutions, additions, or deletions. In some embodiments, the sense strand sequence comprises or consists of a sequence 100% identical to SEQ ID NO: 2584. The sense strand may comprise any modifications or modification pattern described herein. The sense strand may comprise a moiety such as a GalNAc moiety or a lipid moiety. In some embodiments, the siRNA comprises an antisense strand having a sequence in accordance with SEQ ID NO: 2646. In some embodiments, the antisense strand sequence comprises or consists of sequence at least 75% identical to SEQ ID NO: 2646, at least 80% identical to SEQ ID NO: 2646, at least 85% identical to SEQ ID NO: 2646, at least 90% identical to SEQ ID NO: 2646, or at least 95% identical to SEQ ID NO: 2646. In some embodiments, the antisense strand sequence comprises or consists of the sequence of SEQ ID NO 2646, or an antisense strand sequence thereof having 1, 2, 3, or 4 nucleoside substitutions, additions, or deletions. In some embodiments, the antisense strand sequence comprises or consists of the sequence of SEQ ID NO: 2646, or an antisense strand sequence thereof having 1 or 2 nucleoside substitutions, additions, or deletions. In some embodiments, the antisense strand sequence comprises or consists of a sequence 100% identical to SEQ ID NO: 2646. The antisense strand may comprise any modifications or modification pattern described herein. The antisense strand may comprise a moiety such as a GalNAc moiety or a lipid moiety.

[0054] In some embodiments, the siRNA comprises a sense strand having a sequence in accordance with SEQ ID NO: 2604. In some embodiments, the sense strand sequence comprises or consists of sequence at least 75% identical to SEQ ID NO: 2604, at least 80% identical to SEQ ID NO: 2604, at least 85% identical to SEQ ID NO: 2604, at least 90% identical to SEQ ID NO: 2604, or at least 95% identical to SEQ ID NO: 2604. In some embodiments, the sense strand sequence comprises or consists of the sequence of SEQ ID NO 2604, or a sense strand sequence thereof having 1, 2, 3, or 4 nucleoside substitutions, additions, or deletions. In some embodiments, the sense strand sequence comprises or consists of the sequence of SEQ ID NO: 2604, or a sense strand sequence thereof having 1 or 2 nucleoside substitutions, additions, or deletions. In some embodiments, the sense strand sequence comprises or consists of a sequence 100% identical to SEQ ID NO: 2604. The sense strand may comprise any modifications or modification pattern described herein. The sense strand may comprise a moiety such as a GalNAc moiety or a lipid moiety. In some embodiments, the siRNA comprises an antisense strand having a sequence in accordance with SEQ ID NO: 2666. In some embodiments, the antisense strand sequence comprises or consists of sequence at least 75% identical to SEQ ID NO: 2666, at least 80% identical to SEQ ID NO: 2666, at least 85% identical to SEQ ID NO: 2666, at least 90% identical to SEQ ID NO: 2666, or at least 95% identical to SEQ ID NO: 2666. In some embodiments, the antisense strand sequence comprises or consists of the sequence of SEQ ID NO 2666, or an antisense strand sequence thereof having 1, 2, 3, or 4 nucleoside substitutions, additions, or deletions. In some embodiments, the antisense strand sequence comprises or consists of the sequence of SEQ ID NO: 2666, or an antisense strand sequence thereof having 1 or 2 nucleoside substitutions, additions, or deletions. In some embodiments, the antisense strand sequence comprises or consists of a sequence 100% identical to SEQ ID NO: 2666. The antisense strand may comprise any modifications or modification pattern described herein. The antisense strand may comprise a moiety such as a GalNAc moiety or a lipid moiety.

### B. ASOs

[0055] In some embodiments, the composition comprises an oligonucleotide that inhibits the expression of MTRES1, wherein the oligonucleotide comprises an antisense oligonucleotide (ASO). In some embodiments, the ASO is 12-30 nucleosides in length. In some embodiments, the ASO is 14-30 nucleosides in length. In some embodiments, the ASO is at least about 10, 11, 12, 13, 14, 15, 16, 17, 18, 19, 20, 21, 22, 23, 24, 25, 26, 27, 28, 29, or 30 nucleosides in length, or a range defined by any of the two aforementioned numbers. In some embodiments, the ASO is 15-25 nucleosides in length. In some embodiments, the ASO is 20 nucleosides in length.

[0056] In some embodiments, the composition comprises an oligonucleotide that inhibits the expression of MTRES1, wherein the oligonucleotide comprises an ASO about 12-30 nucleosides in length and comprising a nucleoside sequence complementary to about 12-30 contiguous nucleosides of a full-length human MTRES1 mRNA sequence such as SEQ ID NO: 2443; wherein (i) the oligonucleotide comprises a modification comprising a modified nucleoside and/or a modified internucleoside linkage, and/or (ii) the composition comprises a pharmaceutically acceptable carrier. In some embodiments, the ASO comprise a nucleoside sequence complementary to at least about 10, 11, 12, 13, 14, 15, 16, 17, 18, 19, 20, 21, 22, 23, 24, 25, 26, 27, 28, 29, 30, or more contiguous nucleosides of one of SEQ ID NO: 2443.

[0057] In some embodiments, the composition comprises an oligonucleotide that inhibits the expression of MTRES1, wherein the oligonucleotide comprises an ASO about 12-30 nucleosides in length and comprising a nucleoside sequence complementary to about 12-30 contiguous nucleosides of a full-length human MTRES1 mRNA sequence such as SEQ ID NO: 2462; wherein (i) the oligonucleotide comprises a modification comprising a modified nucleoside and/or a modified internucleoside linkage, and/or (ii) the composition comprises a pharmaceutically acceptable carrier. In some embodiments, the ASO comprise a nucleoside sequence complementary to at least about 10, 11, 12, 13, 14, 15, 16, 17, 18, 19, 20, 21, 22, 23, 24, 25, 26, 27, 28, 29, 30, or more contiguous nucleosides of one of SEQ ID NO: 2462.

### C. Modification Patterns

[0058] In some embodiments, the composition comprises an oligonucleotide that inhibits the expression of MTRES1, wherein the oligonucleotide comprises a modification comprising a modified nucleoside and/or a modified internucleoside linkage, and/or (ii) the composition comprises a pharmaceutically acceptable carrier. In some embodiments, the oligonucleotide comprises a modification comprising a modified nucleoside and/or a modified internucleoside linkage. In some embodiments, the oligonucleotide comprises a modified internucleoside linkage. In some embodiments, the modified internucleoside linkage comprises alkylphosphonate, phosphorothioate, methylphosphonate, phosphorodithioate, alkylphosphonothioate, phosphoramidate, carbamate, carbonate, phosphate triester, acetamidate, or carboxymethyl ester, or a combination thereof. In some embodiments, the modified internucleoside linkage comprises one or more phosphorothioate linkages. A phosphorothioate may include a nonbridging oxygen atom in a phosphate backbone of the oligonucleotide that is replaced by sulfur. Modified internucleoside linkages may be included in siRNAs or ASOs. Benefits of the modified internucleoside linkage may include decreased toxicity or improved pharmacokinetics.

[0059] In some embodiments, the composition comprises an oligonucleotide that inhibits the expression of MTRES1, wherein the oligonucleotide comprises a modified internucleoside linkage, wherein the oligonucleotide comprises 1, 2, 3, 4, 5, 6, 7, 8, 9, 10, 11, 12, 13, 14, 15, 16, 17, 18, 19, or 20 modified internucleoside linkages, or a range of modified internucleoside linkages defined by any two of the aforementioned numbers. In some embodiments, the oligonucleotide comprises no more than 18 modified internucleoside linkages. In some embodiments, the oligonucleotide comprises no more than 20 modified internucleoside linkages. In some embodiments, the oligonucleotide comprises 2 or more modified internucleoside linkages, 3 or more modified internucleoside linkages, 4 or more modified internucleoside linkages, 5 or more modified internucleoside linkages, 6 or more modified internucleoside linkages, 7 or more modified internucleoside linkages, 8 or more modified internucleoside linkages, 9 or more modified internucleoside linkages, 10 or more modified internucleoside linkages, 11 or more modified internucleoside linkages, 12 or more modified internucleoside linkages, 13 or more modified internucleoside linkages, 14 or more modified internucleoside linkages, 15 or more modified internucleoside linkages, 16 or more modified internucleoside linkages, 17 or more modified internucleoside linkages, 18 or more modified internucleoside linkages, 19 or more modified internucleoside linkages, or 20 or more modified internucleoside linkages.

[0060] In some embodiments, the composition comprises an oligonucleotide that inhibits the expression of MTRES1, wherein the oligonucleotide comprises the modified nucleoside. In some embodiments, the modified nucleoside comprises a locked nucleic acid (LNA), hexitol nucleic acid (HLA), cyclohexene nucleic acid (CeNA), 2′-methoxyethyl, 2′-O-alkyl, 2′-O-allyl, 2′-fluoro, or 2′-deoxy, or a combination thereof. In some embodiments, the modified nucleoside comprises a LNA. In some embodiments, the modified nucleoside comprises a 2′,4′ constrained ethyl nucleic acid. In some embodiments, the modified nucleoside comprises HLA. In some embodiments, the modified nucleoside comprises CeNA. In some embodiments, the modified nucleoside comprises a 2′-methoxyethyl group. In some embodiments, the modified nucleoside comprises a 2′-O-alkyl group. In some embodiments, the modified nucleoside comprises a 2′-O-allyl group. In some embodiments, the modified nucleoside comprises a 2′-fluoro group. In some embodiments, the modified nucleoside comprises a 2′-deoxy group. In some embodiments, the modified nucleoside comprises a 2′-O-methyl nucleoside, 2′-deoxyfluoro nucleoside, 2′-O—N-methylacetamido (2′-O-NMA) nucleoside, a 2′-O-dimethylaminoethoxyethyl (2′-O-DMAEOE) nucleoside, 2′-O-aminopropyl (2′-O-AP) nucleoside, or 2′-ara-F, or a combination thereof. In some embodiments, the modified nucleoside comprises a 2′-O-methyl nucleoside. In some embodiments, the modified nucleoside comprises a 2′-deoxyfluoro nucleoside. In some embodiments, the modified nucleoside comprises a 2′-O-NMA nucleoside. In some embodiments, the modified nucleoside comprises a 2′-O-DMAEOE nucleoside. In some embodiments, the modified nucleoside comprises a 2′-O-aminopropyl (2′-O-AP) nucleoside. In some embodiments, the modified nucleoside comprises 2′-ara-F. In some embodiments, the modified nucleoside comprises one or more 2′fluoro modified nucleosides. In some embodiments, the modified nucleoside comprises a 2′ O-alkyl modified nucleoside. Benefits of the modified nucleoside may include decreased toxicity or improved pharmacokinetics.

[0061] In some embodiments, the oligonucleotide comprises 1, 2, 3, 4, 5, 6, 7, 8, 9, 10, 11, 12, 13, 14, 15, 16, 17, 18, 19, 20, or 21 modified nucleosides, or a range of nucleosides defined by any two of the aforementioned numbers. In some embodiments, the oligonucleotide comprises no more than 19 modified nucleosides. In some embodiments, the oligonucleotide comprises no more than 21 modified nucleosides. In some embodiments, the oligonucleotide comprises 2 or more modified nucleosides, 3 or more modified nucleosides, 4 or more modified nucleosides, 5 or more modified nucleosides, 6 or more modified nucleosides, 7 or more modified nucleosides, 8 or more modified nucleosides, 9 or more modified nucleosides, 10 or more modified nucleosides, 11 or more modified nucleosides, 12 or more modified nucleosides, 13 or more modified nucleosides, 14 or more modified nucleosides, 15 or more modified nucleosides, 16 or more modified nucleosides, 17 or more modified nucleosides, 18 or more modified nucleosides, 19 or more modified nucleosides, 20 or more modified nucleosides, or 21 or more modified nucleosides.

[0062] Some embodiments include an oligonucleotide comprising: a sense strand having a 5′ end, a 3′ end and a region of complementarity with an antisense strand; an antisense strand having a 5′end, a 3′end and a region of complementarity with the sense strand and a region of complementarity to an mRNA target; an overhang region at the 3′ end of the sense strand having at least 3 contiguous phosphorothioated nucleotides; and an overhang region at the 3′ end of the antisense strand having at least 3 contiguous phosphorothioated nucleotides.

[0063] Some embodiments include an oligonucleotide comprising: a sense strand having a 5′ end, a 3′ end and a region of complementarity with an antisense strand; an antisense strand having a 5′end, a 3′end and a region of complementarity with the sense strand and a region of complementarity to an mRNA target; and an overhang region at the 3′ end of the sense strand having at least 3 contiguous phosphorothioated nucleotides.

[0064] In some embodiments, the oligonucleotide includes two to eight oligonucleotides attached through a linker. The linker may be hydrophobic. In some embodiments, the oligonucleotides independently have substantial chemical stabilization (e.g., at least 40% of the constituent bases are chemically-modified). In some embodiments, the oligonucleotides have full chemical stabilization (i.e., all of the constituent bases are chemically-modified). In some embodiments, the oligonucleotide includes one or more single-stranded phosphorothioated tails, each independently having two to twenty nucleotides. In some embodiments, each single-stranded tail has eight to ten nucleotides.

[0065] In certain embodiments, a compound (e.g. moiety attached to the oligonucleotide) includes three properties: (1) a branched structure, (2) full metabolic stabilization, and (3) the presence of a single-stranded tail comprising phosphorothioate linkers. In a particular embodiment, a compound has 2 or 3 branches. The increased overall size of the branched structures promote increased uptake. Also, without being bound by a particular theory of activity, multiple adjacent branches (e.g., 2 or 3) allow each branch to act cooperatively and thus dramatically enhance rates of internalization, trafficking and release. The compound may include an oligonucleotide described herein, as part of the compound.

[0066] In certain embodiments, a compound includes the following properties: (1) two or more branched oligonucleotides linked via anon-natural linker (2) substantially chemically stabilized, e.g., wherein more than 40%, optimally 100%, of oligonucleotides are chemically modified (e.g., no RNA and optionally no DNA); and (3) phoshorothioated single oligonucleotides containing at least 3, optimally 5-20 phosphorothioated bonds.

[0067] In some embodiments, the oligonucleotide comprises a phosphate at a 5′ end. In some embodiments, the oligonucleotide comprises a phosphate at a 3′ end. In some embodiments, the oligonucleotide comprises a phosphate mimic at a 5′ end. In some embodiments, the oligonucleotide comprises a phosphate mimic at a 3′ end.

[0068] The oligonucleotide may include purines. Examples of purines include adenine (A) or guanine (G), or modified versions thereof. The oligonucleotide may include pyrimidines. Examples of pyrimidines include cytosine (C), thymine (T), or uracil (U), or modified versions thereof.

[0069] In some embodiments, purines of the oligonucleotide comprise 2′ fluoro modified purines. In some embodiments, purines of the oligonucleotide comprise 2′-O-methyl modified purines. In some embodiments, purines of the oligonucleotide comprise a mixture of 2′ fluoro and 2′-O-methyl modified purines. In some embodiments, all purines of the oligonucleotide comprise 2′ fluoro modified purines. In some embodiments, all purines of the oligonucleotide comprise 2′-O-methyl modified purines. In some embodiments, all purines of the oligonucleotide comprise a mixture of 2′ fluoro and 2′-O-methyl modified purines. 2′-O-methyl may include 2′ O-methyl. Where 2′-O-methyl modifications are described, it is contemplated that a 2′-methyl modification may be included, and vice versa.

[0070] In some embodiments, pyrimidines of the oligonucleotide comprise 2′ fluoro modified pyrimidines. In some embodiments, pyrimidines of the oligonucleotide comprise 2′-O-methyl modified pyrimidines. In some embodiments, pyrimidines of the oligonucleotide comprise a mixture of 2′ fluoro and 2′-O-methyl modified pyrimidines. In some embodiments, all pyrimidines of the oligonucleotide comprise 2′ fluoro modified pyrimidines. In some embodiments, all pyrimidines of the oligonucleotide comprise 2′-O-methyl modified pyrimidines. In some embodiments, all pyrimidines of the oligonucleotide comprise a mixture of 2′ fluoro and 2′-O-methyl modified pyrimidines.

[0071] In some embodiments, purines of the oligonucleotide comprise 2′ fluoro modified purines, and pyrimidines of the oligonucleotide comprise a mixture of 2′ fluoro and 2′-O-methyl modified pyrimidines. In some embodiments, purines of the oligonucleotide comprise 2′-O-methyl modified purines, and pyrimidines of the oligonucleotide comprise a mixture of 2′ fluoro and 2′-O-methyl modified pyrimidines. In some embodiments, purines of the oligonucleotide comprise 2′ fluoro modified purines, and pyrimidines of the oligonucleotide comprise 2′-O-methyl modified pyrimidines. In some embodiments, purines of the oligonucleotide comprise 2′-O-methyl modified purines, and pyrimidines of the oligonucleotide comprise 2′ fluoro modified pyrimidines. In some embodiments, pyrimidines of the oligonucleotide comprise 2′ fluoro modified pyrimidines, and purines of the oligonucleotide comprise a mixture of 2′ fluoro and 2′-O-methyl modified purines. In some embodiments, pyrimidines of the oligonucleotide comprise 2′-O-methyl modified pyrimidines, and purines of the oligonucleotide comprise a mixture of 2′ fluoro and 2′-O-methyl modified purines. In some embodiments, pyrimidines of the oligonucleotide comprise 2′ fluoro modified pyrimidines, and purines of the oligonucleotide comprise 2′-O-methyl modified purines. In some embodiments, pyrimidines of the oligonucleotide comprise 2′-O-methyl modified pyrimidines, and purines of the oligonucleotide comprise 2′ fluoro modified purines.

[0072] In some embodiments, all purines of the oligonucleotide comprise 2′ fluoro modified purines, and all pyrimidines of the oligonucleotide comprise a mixture of 2′ fluoro and 2′-O-methyl modified pyrimidines. In some embodiments, all purines of the oligonucleotide comprise 2′-O-methyl modified purines, and all pyrimidines of the oligonucleotide comprise a mixture of 2′ fluoro and 2′-O-methyl modified pyrimidines. In some embodiments, all purines of the oligonucleotide comprise 2′ fluoro modified purines, and all pyrimidines of the oligonucleotide comprise 2′-O-methyl modified pyrimidines. In some embodiments, all purines of the oligonucleotide comprise 2′-O-methyl modified purines, and all pyrimidines of the oligonucleotide comprise 2′ fluoro modified pyrimidines. In some embodiments, all pyrimidines of the oligonucleotide comprise 2′ fluoro modified pyrimidines, and all purines of the oligonucleotide comprise a mixture of 2′ fluoro and 2′-O-methyl modified purines. In some embodiments all pyrimidines of the oligonucleotide comprise 2′-O-methyl modified pyrimidines, and all purines of the oligonucleotide comprise a mixture of 2′ fluoro and 2′-O-methyl modified purines. In some embodiments all pyrimidines of the oligonucleotide comprise 2′ fluoro modified pyrimidines, and all purines of the oligonucleotide comprise 2′-O-methyl modified purines. In some embodiments, all pyrimidines of the oligonucleotide comprise 2′-O-methyl modified pyrimidines, and all purines of the oligonucleotide comprise 2′ fluoro modified purines.

[0073] In some cases, the oligonucleotide comprises a particular modification pattern. In some embodiments, position 9 counting from the 5′ end of the of a strand of the oligonucleotide may have a 2′F modification. In some embodiments, when position 9 of a strand of the oligonucleotide is a pyrimidine, then all purines in a strand of the oligonucleotide have a 2′OMe modification. In some embodiments, when position 9 is the only pyrimidine between positions 5 and 11 of the sense stand, then position 9 is the only position with a 2′F modification in a strand of the oligonucleotide. In some embodiments, when position 9 and only one other base between positions 5 and 11 of a strand of the oligonucleotide are pyrimidines, then both of these pyrimidines are the only two positions with a 2′F modification in a strand of the oligonucleotide. In some embodiments, when position 9 and only two other bases between positions 5 and 11 of a strand of the oligonucleotide are pyrimidines, and those two other pyrimidines are in adjacent positions so that there would be not three 2′F modifications in a row, then any combination of 2′F modifications can be made that give three 2′F modifications in total. In some embodiments, when there are more than 2 pyrimidines between positions 5 and 11 of a strand of the oligonucleotide, then all combinations of pyrimidines having the 2′F modification are allowed that have three to five 2′F modifications in total, provided that a strand of the oligonucleotide does not have three 2′F modifications in a row. In some cases, a strand of the oligonucleotide of any of the siRNAs comprises a modification pattern which conforms to any or all of these a strand of the oligonucleotide rules.

[0074] In some embodiments, when position 9 of a strand of the oligonucleotide is a purine, then all purines in a strand of the oligonucleotide have a 2′OMe modification. In some embodiments, when position 9 is the only purine between positions 5 and 11 of the sense stand, then position 9 is the only position with a 2′F modification in a strand of the oligonucleotide. In some embodiments, when position 9 and only one other base between positions 5 and 11 of a strand of the oligonucleotide are purines, then both of these purines are the only two positions with a 2′F modification in a strand of the oligonucleotide. In some embodiments, when position 9 and only two other bases between positions 5 and 11 of a strand of the oligonucleotide are purines, and those two other purines are in adjacent positions so that there would be not three 2′F modifications in a row, then any combination of 2′F modifications can be made that give three 2′F modifications in total. In some embodiments, when there are more than 2 purines between positions 5 and 11 of a strand of the oligonucleotide, then all combinations of purines having the 2′F modification are allowed that have three to five 2′F modifications in total, provided that a strand of the oligonucleotide does not have three 2′F modifications in a row. In some cases, a strand of the oligonucleotide of any of the siRNAs comprises a modification pattern which conforms to any or all of these a strand of the oligonucleotide rules.

[0075] In some cases, position 9 of a strand of the oligonucleotide can be a 2′deoxy. In these cases, 2′F and 2′OMe modifications may occur at the other positions of a strand of the oligonucleotide. In some cases, a strand of the oligonucleotide of any of the siRNAs comprises a modification pattern which conforms to these a strand of the oligonucleotide rules.

[0076] In some embodiments, position nine of the sense strand comprises a 2′ fluoro-modified pyrimidine. In some embodiments, all purines of the sense strand comprise 2′-O-methyl modified purines.

[0077] In some embodiments, 1, 2, 3, 4, or 5 pyrimidines between positions 5 and 11 comprise a 2′flouro-modified pyrimidine, provided there are not three 2′ fluoro-modified pyrimidines in a row. In some embodiments, the odd-numbered positions of the antisense strand comprise 2′-O-methyl modified nucleotides. In some embodiments, the even-numbered positions of the antisense strand comprise 2′flouro-modified nucleotides and unmodified deoxyribonucleotide. In some embodiments, the even-numbered positions of the antisense strand comprise 2′flouro-modified nucleotides, 2′-O-methyl modified nucleotides and unmodified deoxyribonucleotide. In some embodiments, position nine of the sense strand comprises a 2′ fluoro-modified pyrimidine; all purines of the sense strand comprises 2′-O-methyl modified purines; 1, 2, 3, 4, or 5 pyrimidines between positions 5 and 11 comprise a 2′flouro-modified pyrimidine, provided there are not three 2′ fluoro-modified pyrimidines in a row; the odd-numbered positions of the antisense strand comprise 2′-O-methyl modified nucleotides; and the even-numbered positions of the antisense strand comprise 2′flouro-modified nucleotides and unmodified deoxyribonucleotides.

[0078] In some embodiments, position nine of the sense strand comprises a 2′ fluoro-modified purine. In some embodiments, all pyrimidines of the sense strand comprise 2′-O-methyl modified purines. In some embodiments, 1, 2, 3, 4, or 5 purines between positions 5 and 11 comprise a 2′flouro-modified purine, provided there are not three 2′ fluoro-modified purine in a row. In some embodiments, the odd-numbered positions of the antisense strand comprise 2′-O-methyl modified nucleotides. In some embodiments, the even-numbered positions of the antisense strand comprise 2′flouro-modified nucleotides and unmodified deoxyribonucleotide. In some embodiments, the even-numbered positions of the antisense strand comprise 2′flouro-modified nucleotides, 2′-O-methyl modified nucleotides and unmodified deoxyribonucleotide. In some embodiments, position nine of the sense strand comprises a 2′ fluoro-modified purine; all pyrimidine of the sense strand comprises 2′-O-methyl modified pyrimidines; 1, 2, 3, 4, or 5 purines between positions 5 and 11 comprise a 2′flouro-modified purines, provided there are not three 2′ fluoro-modified purines in a row; the odd-numbered positions of the antisense strand comprise 2′—O-methyl modified nucleotides; and the even-numbered positions of the antisense strand comprise 2′flouro-modified nucleotides and unmodified deoxyribonucleotides. In some embodiments, there are not three 2′ fluoro-modified purines in a row. In some embodiments, there are not three 2′ fluoro-modified pyrimidines in a row.

[0079] In some embodiments, position nine of the sense strand comprises an unmodified deoxyribonucleotide. In some embodiments, positions 5, 7, and 8 of the sense strand comprise 2′fluoro-modifed nucleotides. In some embodiments, all pyrimidines in positions 10 to 21 of the sense strand comprise 2′-O-methyl modified pyrimidines and all purines in positions 10 to 21 of the comprise 2′-O-methyl modified purines or 2′fluoro-modified purines. In some embodiments, the odd-numbered positions of the antisense strand comprise 2′-O-methyl modified nucleotides. In some embodiments, the even-numbered positions of the antisense strand comprise 2′flouro-modified nucleotides and unmodified deoxyribonucleotides. In some embodiments, the even-numbered positions of the antisense strand comprise 2′flouro-modified nucleotides, 2′-O-methyl modified nucleotides and unmodified deoxyribonucleotides. In some embodiments, position nine of the sense strand comprises an unmodified deoxyribonucleotide; positions 5, 7, and 8 of the sense strand comprise 2′fluoro-modifed nucleotides; all pyrimidines in positions 10 to 21 of the sense strand comprise 2′-O-methyl modified pyrimidines and all purines in positions 10 to 21 of the comprise 2′-O-methyl modified purines or 2′fluoro-modified purines; the odd-numbered positions of the antisense strand comprise 2′-O-methyl modified nucleotides; and the even-numbered positions of the antisense strand comprise 2′flouro-modified nucleotides and unmodified deoxyribonucleotides.

[0080] In some embodiments, position nine of the sense strand comprises an unmodified deoxyribonucleotide. In some embodiments, positions 5, 7, and 8 of the sense strand comprise 2′fluoro-modifed nucleotides. In some embodiments, all purines in positions 10 to 21 of the sense strand comprise 2′-O-methyl modified purines and all pyrimidines in positions 10 to 21 of the comprise 2′-O-methyl modified pyrimidines or 2′fluoro-modified pyrimidines. In some embodiments, the odd-numbered positions of the antisense strand comprise 2′-O-methyl modified nucleotides. In some embodiments, the even-numbered positions of the antisense strand comprise 2′flouro-modified nucleotides and unmodified deoxyribonucleotides. In some embodiments, the even-numbered positions of the antisense strand comprise 2′flouro-modified nucleotides, 2′-O-methyl modified nucleotides and unmodified deoxyribonucleotides. In some embodiments, position nine of the sense strand comprises an unmodified deoxyribonucleotide; positions 5, 7, and 8 of the sense strand comprise 2′fluoro-modifed nucleotides; all purines in positions 10 to 21 of the sense strand comprise 2′-O-methyl modified purines and all pyrimidines in positions 10 to 21 of the comprise 2′-O-methyl modified pyrimidines or 2′fluoro-modified pyrimidines; the odd-numbered positions of the antisense strand comprise 2′-O-methyl modified nucleotides; and the even-numbered positions of the antisense strand comprise 2′flouro-modified nucleotides and unmodified deoxyribonucleotide.

[0081] In some embodiments, the moiety includes a negatively charged group attached at a 5′ end of the oligonucleotide. This may be referred to as a 5′-end group. In some embodiments, the negatively charged group is attached at a 5′ end of an antisense strand of an siRNA disclosed herein. The 5′-end group may be or include a 5′-end phosphorothioate, 5′-end phosphorodithioate, 5′-end vinylphosphonate (5′-VP), 5′-end methylphosphonate, 5′-end cyclopropyl phosphonate, or a 5′-deoxy-5′-C-malonyl. The 5′-end group may comprise 5′-VP. In some embodiments, the 5′-VP comprises a trans-vinylphosphate or cis-vinylphosphate. The 5′-end group may include an extra 5′ phosphate. A combination of 5′-end groups may be used.

[0082] In some embodiments, the oligonucleotide includes a negatively charged group. The negatively charged group may aid in cell or tissue penetration. The negatively charged group may be attached at a 5′ or 3′ end (e.g. a 5′ end) of the oligonucleotide. This may be referred to as an end group. The end group may be or include a phosphorothioate, phosphorodithioate, vinylphosphonate, methylphosphonate, cyclopropyl phosphonate, or a deoxy-C-malonyl. The end group may include an extra 5′ phosphate such as an extra 5′ phosphate. A combination of end groups may be used.

[0083] In some embodiments, the oligonucleotide includes a phosphate mimic. In some embodiments, the phosphate mimic comprises vinyl phosphonate. In some embodiments, the vinyl phosphonate comprises a trans-vinylphosphate. In some embodiments, the vinyl phosphonate comprises a cis-vinylphosphate. An example of a nucleotide that includes a vinyl phosphonate is shown below.

[chemical structure]

### 5′ Vinylphosphonate 2′ O Methyl Uridine

[0084] In some embodiments, the vinyl phosphonate increases the stability of the oligonucleotide. In some embodiments, the vinyl phosphonate increases the accumulation of the oligonucleotide in tissues. In some embodiments, the vinyl phosphonate protects the oligonucleotide from an exonuclease or a phosphatase. In some embodiments, the vinyl phosphonate improves the binding affinity of the oligonucleotide with the siRNA processing machinery.

[0085] In some embodiments, the oligonucleotide includes 1 vinyl phosphonate. In some embodiments, the oligonucleotide includes 2 vinyl phosphonates. In some embodiments, the oligonucleotide includes 3 vinyl phosphonates. In some embodiments, the oligonucleotide includes 4 vinyl phosphonates. In some embodiments, the antisense strand of the oligonucleotide comprises a vinyl phosphonate at the 5′ end. In some embodiments, the antisense strand of the oligonucleotide comprises a vinyl phosphonate at the 3′ end. In some embodiments, the sense strand of the oligonucleotide comprises a vinyl phosphonate at the 5′ end. In some embodiments, the sense strand of the oligonucleotide comprises a vinyl phosphonate at the 3′ end.

### 1. Hydrophobic Moieties

[0086] In some embodiments, the composition comprises an oligonucleotide that inhibits the expression of MTRES1, wherein the oligonucleotide comprises a moiety attached at a 3′ or 5′ terminus of the oligonucleotide. Examples of moieties include a hydrophobic moiety or a sugar moiety, or a combination thereof. In some embodiments, the oligonucleotide is an siRNA having a sense strand, and the moiety is attached to a 5′ end of the sense strand. In some embodiments, the oligonucleotide is an siRNA having a sense strand, and the moiety is attached to a 3′ end of the sense strand. In some embodiments, the oligonucleotide is an siRNA having an antisense strand, and the moiety is attached to a 5′ end of the antisense strand. In some embodiments, the oligonucleotide is an siRNA having an antisense strand, and the moiety is attached to a 3′ end of the antisense strand. In some embodiments, the oligonucleotide is an ASO, and the moiety is attached to a 5′ end of the ASO. In some embodiments, the oligonucleotide is an ASO, and the moiety is attached to a 3′ end of the ASO.

[0087] In some embodiments, the composition comprises an oligonucleotide that inhibits the expression of MTRES1, wherein the oligonucleotide comprises a hydrophobic moiety. The hydrophobic moiety may be attached at a 3′ or 5′ terminus of the oligonucleotide. The hydrophobic moiety may include a lipid such as a fatty acid. The hydrophobic moiety may include a hydrocarbon. The hydrocarbon may be linear. The hydrocarbon may be non-linear. The hydrophobic moiety may include a lipid moiety or a cholesterol moiety, or a combination thereof.

[0088] In some embodiments, the composition comprises an oligonucleotide that inhibits the expression of MTRES1, wherein the oligonucleotide comprises a lipid attached at a 3′ or 5′ terminus of the oligonucleotide. In some embodiments, the lipid comprises cholesterol, myristoyl, palmitoyl, stearoyl, lithocholoyl, docosanoyl, docosahexaenoyl, myristyl, palmityl stearyl, or α-tocopherol, or a combination thereof.

[0089] In some embodiments, the oligonucleotide comprises a lipophilic moiety attached at a 3′ or 5′ terminus of the oligonucleotide. In some embodiments, the lipophilic moiety comprises cholesterol, retinoic acid, cholic acid, adamantane acetic acid, 1-pyrene butyric acid, dihydrotestosterone, 1,3-bis-O(hexadecyl)glycerol, geranyloxyhexyanol, hexadecylglycerol, borneol, menthol, 1,3-propanediol, a heptadecyl group, palmitic acid, myristic acid, 03-(oleoyl)lithocholic acid, 03-(oleoyl)cholenic acid, ibuprofen, naproxen, dimethoxytrityl, or phenoxazine, or a combination thereof. The lipophilic moiety may include a steroid such as cholesterol. The lipophilic moiety may include retinoic acid. The lipophilic moiety may include cholic acid. The lipophilic moiety may include adamantane acetic acid. The lipophilic moiety may include 1-pyrene butyric acid. The lipophilic moiety may include dihydrotestosterone. The lipophilic moiety may include 1,3-bis-O(hexadecyl)glycerol. The lipophilic moiety may include geranyloxyhexyanol. The lipophilic moiety may include hexadecylglycerol. The lipophilic moiety may include borneol. The lipophilic moiety may include menthol. The lipophilic moiety may include 1,3-propanediol. The lipophilic moiety may include a heptadecyl group. The lipophilic moiety may include palmitic acid. The lipophilic moiety may include myristic acid. The lipophilic moiety may include O3-(oleoyl)lithocholic acid. The lipophilic moiety may include 03-(oleoyl)cholenic acid. The lipophilic moiety may include ibuprofen. The lipophilic moiety may include naproxen. The lipophilic moiety may include dimethoxytrityl. The lipophilic moiety may include phenoxazine.

[0090] In some embodiments, the lipophilic moiety comprises a hydrocarbon chain. The hydrocarbon chain may comprise or consist of a C4-C30 hydrocarbon chain. In some embodiments, the lipophilic moiety comprises a lipid.

[0091] In some embodiments, the oligonucleotide includes one or more lipophilic monomers, containing one or more lipophilic moieties, conjugated to one or more positions on at least one strand of the oligonucleotide, optionally via a linker or carrier. For instance, some embodiments provide an oligonucleotide comprising: an antisense strand which is complementary to a target gene; a sense strand which is complementary to said antisense strand; and one or more lipophilic monomers, containing one or more lipophilic moieties, conjugated to one or more positions on at least one strand, optionally via a linker or carrier. In some embodiments, the lipophilicity of the lipophilic moiety, measured by octanol-water partition coefficient, log P, exceeds 0.

[0092] In some embodiments, the lipophilic moiety is an aliphatic, cyclic such as alicyclic, or polycyclic such as polyalicyclic compound, such as a steroid (e.g., sterol), a linear or branched aliphatic hydrocarbon, or an aromatic. Exemplary lipophilic moieties may include lipid, cholesterol, retinoic acid, cholic acid, adamantane acetic acid, 1-pyrene butyric acid, dihydrotestosterone, 1,3-bis-O(hexadecyl)glycerol, geranyloxyhexyanol, hexadecylglycerol, borneol, menthol, 1,3-propanediol, heptadecyl group, palmitic acid, myristic acid, O3-(oleoyl)lithocholic acid, 03-(oleoyl)cholenic acid, ibuprofen, naproxen, dimethoxytrityl, or phenoxazine. Suitable lipophilic moieties may also include those containing a saturated or unsaturated C4-C30 hydrocarbon chain (e.g., C4-C30 alkyl or alkenyl), and an optional functional group selected from the group consisting of hydroxyl, amine, carboxylic acid, sulfonate, phosphate, thiol, azide, and alkyne. The functional group may be useful to attach the lipophilic moiety to the oligonucleotide. In some embodiments, the lipophilic moiety contains a saturated or unsaturated C6-C18 hydrocarbon chain (e.g., a linear C6-C18 alkyl or alkenyl). In some embodiments, the lipophilic moiety contains a saturated or unsaturated C16 hydrocarbon chain (e.g., a linear C16 alkyl or alkenyl). In some embodiments, the lipophilic moiety contains two or more carbon-carbon double bonds.

[0093] In some embodiments, the composition comprises an oligonucleotide that inhibits the expression of MTRES1, wherein the oligonucleotide comprises a hydrophobic moiety. The hydrophobic moiety may be attached at a 3′ or 5′ terminus of the oligonucleotide. The hydrophobic moiety may include a lipid such as a fatty acid. The hydrophobic moiety may include a hydrocarbon. The hydrocarbon may be linear. The hydrocarbon may be non-linear. The hydrophobic moiety may include a lipid moiety or a cholesterol moiety, or a combination thereof.

[0094] In some embodiments, the composition comprises an oligonucleotide that inhibits the expression of MTRES1, wherein the oligonucleotide comprises a lipid attached at a 3′ or 5′ terminus of the oligonucleotide. In some embodiments, the lipid comprises cholesterol, myristoyl, palmitoyl, stearoyl, lithocholoyl, docosanoyl, docosahexaenoyl, myristyl, palmityl, stearyl, or α-tocopherol, or a combination thereof.

[0095] In some embodiments, the composition comprises an oligonucleotide that inhibits the expression of MTRES1, wherein the oligonucleotide comprises a hydrophobic ligand or moiety. In some embodiments, the hydrophobic ligand or moiety comprises cholesterol. In some embodiments, the hydrophobic ligand or moiety comprises a cholesterol derivative. In some embodiments, the hydrophobic ligand or moiety is attached at a 3′ terminus of the oligonucleotide. In some embodiments, the hydrophobic ligand or moiety s attached at a 5′ terminus of the oligonucleotide. In some embodiments, the composition comprises a sense strand, and the hydrophobic ligand or moiety is attached to the sense strand (e.g. attached to a 5′ end of the sense strand, or attached to a 3′ end of the sense strand). In some embodiments, the composition comprises an antisense strand, and the hydrophobic ligand or moiety is attached to the antisense strand (e.g. attached to a 5′ end of the antisense strand, or attached to a 3′ end of the antisense strand). In some embodiments, the composition comprises a hydrophobic ligand or moiety attached at a 3′ or 5′ terminus of the oligonucleotide.

[0096] In some embodiments, a hydrophobic moiety is attached to the oligonucleotide (e.g. a sense strand and/or an antisense strand of a siRNA). In some embodiments, a hydrophobic moiety is attached at a 3′ terminus of the oligonucleotide. In some embodiments, a hydrophobic moiety is attached at a 5′ terminus of the oligonucleotide. In some embodiments, the hydrophobic moiety comprises cholesterol. In some embodiments, the hydrophobic moiety includes a cyclohexanyl.

[0097] In some embodiments, the composition comprises an oligonucleotide that inhibits the expression of MTRES1, wherein the oligonucleotide comprises a lipid attached at a 3′ or 5′ terminus of the oligonucleotide. In some embodiments, a lipid is attached at a 3′ terminus of the oligonucleotide. In some embodiments, a lipid is attached at a 5′ terminus of the oligonucleotide. In some embodiments, the lipid comprises cholesterol, myristoyl, palmitoyl, stearoyl, lithocholoyl, docosanoyl, docosahexaenoyl, myristyl, palmityl, stearyl, or α-tocopherol, or a combination thereof. In some embodiments, the lipid comprises stearyl, lithocholyl, docosanyl, docosahexaenyl, or myristyl. In some embodiments, the lipid comprises cholesterol. In some embodiments, the lipid includes a sterol such as cholesterol. In some embodiments, the lipid comprises stearyl, t-butylphenol, n-butylphenol, octylphenol, dodecylphenol, phenyl n-dodecyl, octadecylbenzamide, hexadecylbenzamide, or octadecylcyclohexyl. In some embodiments, the lipid comprises phenyl para C12.

[0098] In some embodiments, the oligonucleotide comprises any aspect of the following structure:

[chemical structure]

[0099] In some embodiments, the oligonucleotide comprises any aspect of the following structure:

[chemical structure]

In some embodiments, the oligonucleotide comprises any aspect of the following structure:

[chemical structure]

In some embodiments, the oligonucleotide comprises any aspect of the following structure: The aspect included in the oligonucleotide may include the entire structure, or may include the lipid moiety, of any of the structures shown. In some embodiments, n is 1-3. In some embodiments, n is 1. In some embodiments, n is 2. In some embodiments, n is 3. In some embodiments, R is an alkyl group. In some embodiments, the alkyl group contains 1, 2, 3, 4, 5, 6, 7, 8, 9, 10, 11, 12, 13, 14, 15, 16, 17, 18, 19, or 20 carbons. In some embodiments, the alkyl group contains 4, 5, 6, 7, 8, 9, 10, 11, 12, 13, 14, 15, 16, 17, or 18 carbons, or a range defined by any two of the aforementioned numbers of carbons. In some embodiments, the alkyl group contains 4-18 carbons. In some embodiments, the lipid moiety comprises an alcohol or ether.

[0100] In some embodiments, the lipid includes a fatty acid. In some embodiments, the lipid comprises a lipid depicted in Table 1. The example lipid moieties in Table 1 are shown attached at a 5′ end of an oligonucleotide, in which the 5′ terminal phosphate of the oligonucleotide is shown with the lipid moiety. In some embodiments, a lipid moiety in Table 1 may be attached at a different point of attachment than shown. For example, the point of attachment of any of the lipid moieties in the table may be at a 3′ oligonucleotide end. In some embodiments, the lipid is used for targeting the oligonucleotide to a non-hepatic cell or tissue.

TABLE 1
Hydrophobic moiety examples

| Hydrophobic | Hydrophobic | |
|---|---|---|
| Moiety Description | Moiety Name | Example Conjugation |
| stearyl | ETL3 | [chemical structure] |
| t-butylphenyl | ETL7 | [chemical structure] |
| n-butylphenyl | ETL8 | [chemical structure] |
| octylphenyl | ETL9 | [chemical structure] |
| dodecylphenyl | ETL10 | [chemical structure] |
| phenyl n-dodecyl | ETL12 | [chemical structure] |
| octadecylbenzamide | ETL13 | [chemical structure] |
| hexadecylbenzamide | ETL15 | [chemical structure] |
| octadecylcyclohexyl | ETL16 | [chemical structure] |

[0101] In some embodiments, the lipid or lipid moiety includes 16 to 18 carbons. In some embodiments, the lipid includes 16 carbons. In some embodiments, the lipid includes 17 carbons. In some embodiments, the lipid includes 18 carbons. In some embodiments, the lipid moiety includes 16 carbons. In some embodiments, the lipid moiety includes 17 carbons. In some embodiments, the lipid moiety includes 18 carbons.

[0102] The hydrophobic moiety may include a linker that comprises a carbocycle. The carbocycle may be six-membered. Some examples of a carbocycle include phenyl or cyclohexyl. The linker may include a phenyl. The linker may include a cyclohexyl. The lipid may be attached to the carbocycle, which may in turn be attached at a phosphate (e.g. 5′ or 3′ phosphate) of the oligonucleotide. In some embodiments, the lipid or hydrocarbon, and the end of the sense are connected to the phenyl or cyclohexyl linker in the 1,4; 1,3; or 1,2 substitution pattern (e.g. the para, meta, or ortho phenyl configuration). In some embodiments, the lipid or hydrocarbon, and the end of the sense are connected to the phenyl or cyclohexyl linker in the 1,4 substitution pattern (e.g. the para phenyl configuration). The lipid may be attached to the carbocycle in the 1,4 substitution pattern relative to the oligonucleotide. The lipid may be attached to the carbocycle in the 1,3 substitution pattern relative to the oligonucleotide. The lipid may be attached to the carbocycle in the 1,2 substitution pattern relative to the oligonucleotide. The lipid may be attached to the carbocycle in the ortho orientation relative to the oligonucleotide. The lipid may be attached to the carbocycle in the para orientation relative to the oligonucleotide. The lipid may be attached to the carbocycle in the meta orientation relative to the oligonucleotide.

[0103] The lipid moiety may comprise or consist of the following structure:

[chemical structure]

In some embodiments, the lipid moiety comprises or consists of the following structure:

[chemical structure]

In some embodiments, the lipid moiety comprises the following structure

[chemical structure]

In some embodiments, the lipid moiety comprises or consist of the following structure:

[chemical structure]

In some embodiments, the dotted line indicates a covalent connection. The covalent connection may between an end of the sense or antisense strand. For example, the connection may be to the 5′ end of the sense strand. In some embodiments, n is 0-3. In some embodiments, n is 1-3. In some embodiments, n is 0. In some embodiments, n is 1. In some embodiments, n is 2. In some embodiments, n is 3. In some embodiments, n is 4. In some embodiments, n is 5. In some embodiments, n is 1, 2, 3, 4, 5, 6, 7, 8, 9, or 10. In some embodiments, R is an alkyl group. In some embodiments, the alkyl group contains 1, 2, 3, 4, 5, 6, 7, 8, 9, 10, 11, 12, 13, 14, 15, 16, 17, 18, 19, or 20 carbons. In some embodiments, the alkyl group contains 4, 5, 6, 7, 8, 9, 10, 11, 12, 13, 14, 15, 16, 17, or 18 carbons, or a range defined by any two of the aforementioned numbers of carbons. In some embodiments, R comprises or consists of an alkyl group containing 4-18 carbons.

[0104] The lipid moiety may be attached at a 5′ end of the oligonucleotide. The 5′ end may have one phosphate linking the lipid moiety to a 5′ carbon of a sugar of the oligonucleotide. The 5′ end may have two phosphates linking the lipid moiety to a 5′ carbon of a sugar of the oligonucleotide. The 5′ end may have three phosphates linking the lipid moiety to a 5′ carbon of a sugar of the oligonucleotide. The 5′ end may have one phosphate connected to the 5′ carbon of a sugar of the oligonucleotide, where the one phosphate is connected to the lipid moiety. The 5′ end may have two phosphates connected to the 5′ carbon of a sugar of the oligonucleotide, where the one of the two phosphates is connected to the lipid moiety. The 5′ end may have three phosphates connected to the 5′ carbon of a sugar of the oligonucleotide, where the one of the three phosphates is connected to the lipid moiety. The sugar may include a ribose. The sugar may include a deoxyribose. The sugar may be modified a such as a 2′ modified sugar (e.g. a 2′ O-methyl or 2′ fluoro ribose). A phosphate of the 5′ end may include a modification such as a sulfur in place of an oxygen. Two phosphates of the 5′ end may include a modification such as a sulfur in place of an oxygen. Three phosphates of the 5′ end may include a modification such as a sulfur in place of an oxygen.

[0105] In some embodiments, the oligonucleotide includes 1 lipid moiety. In some embodiments, the oligonucleotide includes 2 lipid moieties. In some embodiments, the oligonucleotide includes 3 lipid moieties. In some embodiments, the oligonucleotide includes 4 lipid moieties.

[0106] Some embodiments relate to a method of making an oligonucleotide comprising a hydrophobic conjugate. A strategy for making hydrophobic conjugates may include use of a phosphoramidite reagent based upon a 6-membered ring alcohol such as a phenol or cyclohexanol. The phosphoramidite may be reacted to a nucleotide to connect the nucleotide to the hydrophobic moiety, and thereby produce the hydrophobic conjugate. Some examples of phosphoramidite reagents that may be used to produce a hydrophobic conjugate are provided as follows:

[chemical structure]

In some embodiments, n is 1-3. In some embodiments, n is 1. In some embodiments, n is 2. In some embodiments, n is 3. In some embodiments, R is an alkyl group. In some embodiments, the alkyl group contains 1, 2, 3, 4, 5, 6, 7, 8, 9, 10, 11, 12, 13, 14, 15, 16, 17, 18, 19, or 20 carbons. In some embodiments, the alkyl group contains 4, 5, 6, 7, 8, 9, 10, 11, 12, 13, 14, 15, 16, 17, or 18 carbons, or a range defined by any two of the aforementioned numbers of carbons. In some embodiments, R comprises or consists of an alkyl group containing 4-18 carbons. Any one of the phosphoramidite reagents may be reacted to a 5′ end of an oligonucleotide to produce an oligonucleotide comprising a hydrophobic moiety. In some embodiments, the phosphoramidite reagents is reacted to a 5′ end of a sense strand of an siRNA. The sense strand may then be hybridized to an antisense strand to form a duplex. The hybridization may be performed by incubating the sense and antisense strands in solution at a given temperature. The temperature may be gradually reduced. The temperature may comprise or include a temperature comprising an annealing temperature for the sense and antisense strands. The temperature may be below or include a temperature below the annealing temperature for the sense and antisense strands. The temperature may be below a melting temperature of the sense and antisense strands.

[0107] The lipid may be attached to the oligonucleotide by a linker. The linker may include a polyethyleneglycol (e.g. tetraethyleneglycol).

[0108] The modifications described herein may be useful for delivery to a cell or tissue, for example, extrahepatic delivery or targeting of an oligonucleotide composition. The modifications described herein may be useful for targeting an oligonucleotide composition to a cell or tissue.

2. Sugar moieties

[0109] In some embodiments, the composition comprises an oligonucleotide that inhibits the expression of MTRES1, wherein the oligonucleotide comprises a sugar moiety. The sugar moiety may include an N-acetyl galactose moiety (e.g. an N-acetylgalactosamine (GalNAc) moiety), an N-acetyl glucose moiety (e.g. an N-acetylglucosamine (GlcNAc) moiety), a fucose moiety, or a mannose moiety. The sugar moiety may include 1, 2, 3, or more sugar molecules. The sugar moiety may be attached at a 3′ or 5′ terminus of the oligonucleotide. The sugar moiety may include an N-acetyl galactose moiety. The sugar moiety may include an N-acetylgalactosamine (GalNAc) moiety. The sugar moiety may include an N-acetyl glucose moiety. The sugar moiety may include N-acetylglucosamine (GlcNAc) moiety. The sugar moiety may include a fucose moiety. The sugar moiety may include a mannose moiety. N-acetyl glucose, GlcNAc, fucose, or mannose may be useful for targeting macrophages when they target or bind a mannose receptor such as CD206. The sugar moiety may be useful for binding or targeting an asialoglycoprotein receptor such as an asialoglycoprotein receptor of a hepatocyte. The GalNAc moiety may bind to an asialoglycoprotein receptor. The GalNAc moiety may target a hepatocyte.

[0110] In some embodiments, the composition comprises an oligonucleotide that inhibits the expression of MTRES1, wherein the oligonucleotide comprises an N-acetylgalactosamine (GalNAc) moiety. GalNAc may be useful for hepatocyte targeting. The GalNAc moiety may include a bivalent or trivalent branched linker. The oligo may be attached to 1, 2 or 3 GalNAcs through a bivalent or trivalent branched linker. The GalNAc moiety may include 1, 2, 3, or more GalNAc molecules. The GalNAc moiety may be attached at a 3′ or 5′ terminus of the oligonucleotide.

[0111] In some embodiments, the composition comprises an oligonucleotide that inhibits the expression of MTRES1, wherein the oligonucleotide comprises an N-acetylgalactosamine (GalNAc) ligand for hepatocyte targeting. In some embodiments, the composition comprises GalNAc. In some embodiments, the composition comprises a GalNAc derivative. In some embodiments, the GalNAc ligand is attached at a 3′ terminus of the oligonucleotide. In some embodiments, the GalNAc ligand is attached at a 5′ terminus of the oligonucleotide. In some embodiments, the composition comprises a sense strand, and the GalNAc ligand is attached to the sense strand (e.g. attached to a 5′ end of the sense strand, or attached to a 3′ end of the sense strand). In some embodiments, the composition comprises an antisense strand, and the GalNAc ligand is attached to the antisense strand (e.g. attached to a 5′ end of the antisense strand, or attached to a 3′ end of the antisense strand). In some embodiments, the composition comprises a GalNAc ligand attached at a 3′ or 5′ terminus of the oligonucleotide.

[0112] Disclosed herein, in some embodiments, are compositions comprising an oligonucleotide that inhibits the expression of MTRES1, wherein the oligonucleotide comprises a GalNAc moiety. The GalNAc moiety may be included in any formula, structure, or GalNAc moiety shown below. In some embodiments, described herein is a compound (e.g. oligonucleotide) represented by Formula (I) or (II):

[chemical structure]

[0113] or a salt thereof, wherein
[0114] J is an oligonucleotide;
[0115] each w is independently selected from any value from 1 to 20;
[0116] each v is independently selected from any value from 1 to 20;
[0117] n is selected from any value from 1 to 20;
[0118] m is selected from any value from 1 to 20;
[0119] z is selected from any value from 1 to 3, wherein
   [0120] if z is 3, Y is C
   [0121] if z is 2, Y is CR⁶, or
   [0122] if z is 1, Y is C(R⁶)₂;
[0123] Q is selected from:
   [0124] C₃₋₁₀ carbocycle optionally substituted with one or more substituents independently selected from halogen, —CN, —NO₂, —OR⁷, —SR⁷, —N(R⁷)₂, —C(O)R⁷, —C(O)N(R⁷)₂, —N(R⁷)C(O)R⁷, —N(R⁷)C(O)N(R⁷)₂, —OC(O)N(R⁷)₂, —N(R)C(O)OR⁷, —C(O)OR⁷, —OC(O)R⁷, —S(O)R⁷, and C₁₋₆ alkyl, wherein the C₁₋₆ alkyl, is optionally substituted with one or more substituents independently selected from halogen, —CN, —OH, —SH, —NO₂, and —NH₂;
[0125] R¹ is a linker selected from:
   [0126] —O—, —S—, —N(R⁷)—, —C(O)—, —C(O)N(R⁷)—, —N(R⁷)C(O)—, —N(R⁷)C(O)N(R⁷)—, —OC(O)N(R⁷)—, —N(R⁷)C(O)O—, —C(O)O—, —OC(O)—, —S(O)—, —S(O)₂—, —OS(O)₂—, —OP(O)(OR⁷)O—, —SP(O)(OR⁷)O—, —OP(S)(OR⁷)O—, —OP(O)(SR)O—, —OP(O)(OR⁷)S—, —OP(O)(O⁷)O—, —SP(O)(O⁻)O—, —OP(S)(O⁻)O—, —OP(O)(S—)O—, —OP(O)(O⁻)S—, —OP(O)(OR⁷)NR⁷—, —OP(O)(N(R⁷)₂)NR⁷—, —OP(OR⁷)O—, —OP(N(R⁷)₂)O—, —OP(OR⁷)N(R⁷)—, and —OPN(R⁷)₂NR⁷—;
[0127] each R² is independently selected from: C₁₋₆ alkyl optionally substituted with one or more substituents independently selected from halogen, —OR⁷, —SR⁷, —N(R⁷)₂, —C(O)R⁷, —C(O)N(R⁷)₂, —N(R⁷)C(O)R⁷, —N(R⁷)C(O)N(R⁷)₂, —OC(O)N(R⁷)₂, —N(R⁷)C(O)OR⁷, —C(O)OR⁷, —OC(O)R⁷, and —S(O)R⁷; R³ and R⁴ are each independently selected from: —OR⁷, —SR⁷, —N(R⁷)₂, —C(O)R⁷, —C(O)N(R⁷)₂, —N(R⁷)C(O)R⁷, —N(R⁷)C(O)N(R⁷)₂, —OC(O)N(R⁷)₂, —N(R⁷)C(O)OR⁷, —C(O)OR⁷, —OC(O)R⁷, and —S(O)R⁷;
[0128] each R⁵ is independently selected from: —OC(O)R⁷, —OC(O)N(R⁷)₂, —N(R⁷)C(O)R⁷, —N(R⁷)C(O)N(R⁷)₂, —N(R⁷)C(O)OR⁷, —C(O)R⁷, —C(O)OR⁷, and —C(O)N(R⁷)₂;
[0129] each R⁶ is independently selected from:
[0130] hydrogen;
[0131] halogen, —CN, —NO₂, —OR⁷, —SR⁷, —N(R⁷)₂, —C(O)R⁷, —C(O)N(R⁷)₂, —N(R)C(O)R⁷, —N(R⁷)C(O)N(R⁷)₂, —OC(O)N(R⁷)₂, —N(R)C(O)OR⁷, —C(O)OR⁷, —OC(O)R⁷, and —S(O)R⁷; and C₁₋₆ alkyl optionally substituted with one or more substituents independently selected from halogen, —CN, —NO₂, —OR⁷, —SR⁷, —N(R⁷)₂, —C(O)R⁷, —C(O)N(R⁷)₂, —N(R⁷)C(O)R⁷, —N(R⁷)C(O)N(R⁷)₂, —OC(O)N(R⁷)₂, —N(R)C(O)OR⁷, —C(O)OR⁷, —OC(O)R⁷, and —S(O)R⁷; each R⁷ is independently selected from:
[0132] hydrogen; C₁₋₆ alkyl, C₂₋₆ alkenyl, and C₂₋₆ alkynyl, each of which is optionally substituted with one or more substituents independently selected from halogen, —CN, —OH, —SH, —NO₂, —NH₂, =0, ═S, —O—C₁₋₆ alkyl, —S—C₁₋₆ alkyl, —N(C₁₋₆ alkyl)₂, —NH(C₁₋₆ alkyl), C₃₋₁₀ carbocycle, and 3- to 10-membered heterocycle; and C₃₋₁₀ carbocycle, and 3- to 10-membered heterocycle, each of which is optionally substituted with one or more substituents independently selected from halogen, —CN, —OH, —SH, —NO₂, —NH₂, =0, ═S, —O—C₁₋₆ alkyl, —S—C₁₋₆ alkyl, —N(C₁₋₆ alkyl)₂, —NH(C₁₋₆ alkyl), C₁₋₆ alkyl, C₂₋₆ alkenyl, C₂₋₆ alkynyl, C₃₋₁₀ carbocycle, 3- to 10-membered heterocycle, and C₁₋₆haloalkyl.

[0133] In some embodiments, each w is independently selected from any value from 1 to 10. In some embodiments, each w is independently selected from any value from 1 to 5. In some embodiments, each w is 1. In some embodiments, each v is independently selected from any value from 1 to 10. In some embodiments, each v is independently selected from any value from 1 to 5. In some embodiments, each v is 1. In some embodiments, n is selected from any value from 1 to 10. In some embodiments, n is selected from any value from 1 to 5. In some embodiments, n is 2. In some embodiments, m is selected from any value from 1 to 10. In some embodiments, m is selected from any value from 1 to 5. In some embodiments, m is selected from 1 and 2. In some embodiments, z is 3 and Y is C. In some embodiments, Q is selected from C₅₋₆ carbocycle optionally substituted with one or more substituents independently selected from halogen, —CN, —NO₂, —OR⁷, —SR⁷, —N(R⁷)₂, —C(O)R⁷, —C(O)N(R⁷)₂, —N(R⁷)C(O)R⁷, —N(R⁷)C(O)N(R⁷)₂, —OC(O)N(R⁷)₂, —N(R⁷)C(O)OR⁷, —C(O)OR⁷, —OC(O)R⁷, and —S(O)R⁷. In some embodiments, Q is selected from C₅₋₆ carbocycle optionally substituted with one or more substituents independently selected from halogen, —CN, —OH, —SH, —NO₂, and —NH₂. In some embodiments, Q is selected from phenyl and cyclohexyl, each of which is optionally substituted with one or more substituents independently selected from halogen, —CN, —OH, —SH, —NO₂, and —NH₂. In some embodiments, Q is selected from phenyl. In some embodiments, Q is selected from cyclohexyl. In some embodiments, R¹ is selected from —OP(O)(OR⁷)O—, —SP(O)(OR⁷)O—, —OP(S)(OR⁷)O—, —OP(O)(SR⁷)O—, —OP(O)(OR⁷)S—, —OP(O)(O⁻)O—, —SP(O)(O⁻)O—, —OP(S)(O⁻)O—, —OP(O)(S—)O—, —OP(O)(O⁻)S—, —OP(O)(OR⁷)NR⁷—, —OP(O)(N(R⁷)₂)NR⁷—, —OP(OR⁷)O—, —OP(N(R⁷)₂)O—, —OP(OR⁷)N(R⁷)—, and —OPN(R⁷)₂—NR⁷. In some embodiments, R¹ is selected from —OP(O)(OR⁷)O—, —SP(O)(OR⁷)O—, —OP(S)(OR⁷)O—, —OP(O)(SR⁷)O—, —OP(O)(OR⁷)S—, —OP(O)(O⁻)O—, —SP(O)(0)O—, —OP(S)(O⁻)O—, —OP(O)(S—)O—, —OP(O)(0-)S—, and —OP(OR⁷)O—. In some embodiments, R¹ is selected from —OP(O)(OR⁷)O—, —OP(S)(OR⁷)O—, —OP(O)(0-)O—, —OP(S)(O)O—, —OP(O)(S—)O—, and —OP(OR⁷)O—. In some embodiments, R¹ is selected from —OP(O)(OR⁷)O— and —OP(OR⁷)O—. In some embodiments, R² is selected from C₁₋₃ alkyl substituted with one or more substituents independently selected from halogen, —OR⁷, —OC(O)R⁷, —SR⁷, —N(R)₂, —C(O)R⁷, and —S(O)R⁷. In some embodiments, R² is selected from C₁₋₃ alkyl substituted with one or more substituents independently selected from —OR⁷, —OC(O)R⁷, —SR⁷, and —N(R⁷)₂. In some embodiments, R² is selected from C₁₋₃ alkyl substituted with one or more substituents independently selected from —OR⁷ and —OC(O)R⁷. In some embodiments, R³ is selected from halogen, —OR⁷, —SR⁷, —N(R⁷)₂, —C(O)R⁷, —OC(O)R⁷, and —S(O)R⁷. In some embodiments, R³ is selected from —OR⁷—SR⁷, —OC(O)R⁷, and —N(R⁷)₂. In some embodiments, R³ is selected from —OR⁷— and —OC(O)R⁷. In some embodiments, R⁴ is selected from halogen, —OR⁷, —SR⁷, —N(R⁷)₂, —C(O)R⁷, —OC(O)R⁷, and —S(O)R⁷. In some embodiments, R⁴ is selected from —OR⁷—SR⁷, —OC(O)R⁷, and —N(R)₂. In some embodiments, R⁴ is selected from —OR⁷— and —OC(O)R⁷. In some embodiments, R⁵ is selected from —OC(O)R⁷, —OC(O)N(R⁷)₂, —N(R⁷)C(O)R⁷, —N(R⁷)C(O)N(R⁷)₂, and —N(R⁷)C(O)OR⁷. In some embodiments, R⁵ is selected from —OC(O)R⁷ and —N(R⁷)C(O)R⁷. In some embodiments, each R⁷ is independently selected from: hydrogen; and C₁₋₆ alkyl optionally substituted with one or more substituents independently selected from halogen, —CN, —OH, —SH, —NO₂, —NH₂, =0, ═S, —O—C₁₋₆ alkyl, —S—C₁₋₆ alkyl, —N(C₁₋₆ alkyl)₂, —NH(C₁₋₆ alkyl), C₃₋₁₀ carbocycle, or 3-to 10-membered heterocycle. In some embodiments, each R⁷ is independently selected from C₁₋₆ alkyl optionally substituted with one or more substituents independently selected from halogen, —CN, —OH, —SH, —NO₂, —NH₂, =0, ═S, —O—C₁₋₆ alkyl, —S—C₁₋₆ alkyl, —N(C₁₋₆ alkyl)₂, and —NH(C₁₋₆ alkyl). In some embodiments, each R⁷ is independently selected from C₁₋₆ alkyl optionally substituted with one or more substituents independently selected from halogen, —CN, —OH, and —SH. In some embodiments, w is 1; v is 1; n is 2; m is 1 or 2; z is 3 and Y is C; Q is phenyl or cyclohexyl, each of which is optionally substituted with one or more substituents independently selected from halogen, —CN, —OH, —SH, —NO₂, —NH₂, and C₁₋₃ alkyl; R¹ is selected from —OP(O)(OR O—, —OP(S)(OR O—, —OP(O)(O⁻)O—, —OP(S)(O⁻)O—, —OP(O)(S)O—, and —OP(OR⁷)O—; R² is C₁ alkyl substituted with —OH or —OC(O)CH₃;

R³ is —OH or —OC(O)CH₃; R⁴ is —OH or —OC(O)CH₃; and R⁵ is —NH(O)CH₃. In some embodiments, the compound comprises:

[chemical structure]

[chemical structure]

[chemical structure]

[chemical structure]

[chemical structure]

[chemical structure]

[chemical structure]

[chemical structure]

[0134] In some embodiments, the oligonucleotide (J) is attached at a 5′ end or a 3′ end of the oligonucleotide. In some embodiments, the oligonucleotide comprises DNA. In some embodiments, the oligonucleotide comprises RNA. In some embodiments, the oligonucleotide comprises one or more modified internucleoside linkages. In some embodiments, the one or more modified internucleoside linkages comprise alkylphosphonate, phosphorothioate, methylphosphonate, phosphorodithioate, alkylphosphonothioate, phosphoramidate, carbamate, carbonate, phosphate triester, acetamidate, or carboxymethyl ester, or a combination thereof. In some embodiments, the oligonucleotide comprises 1, 2, 3, 4, 5, 6, 7, 8, 9, 10, 11, 12, 13, 14, 15, 16, 17, 18, 19, or 20 modified internucleoside linkages. In some embodiments, the compound binds to an asialoglycoprotein receptor. In some embodiments, the compound targets a hepatocyte.

[0135] Some embodiments include the following, where J is the oligonucleotide:

[chemical structure]

J may include one or more additional phosphates, or one or more phosphorothioates linking to the oligonucleotide. J may include one or more additional phosphates linking to the oligonucleotide. J may include one or more phosphorothioates linking to the oligonucleotide.

[0136] Some embodiments include the following, where J is the oligonucleotide:

[chemical structure]

J may include one or more additional phosphates, or one or more phosphorothioates linking to the oligonucleotide. J may include one or more additional phosphates linking to the oligonucleotide. J may include one or more phosphorothioates linking to the oligonucleotide.

[0137] Some embodiments include the following, where J is the oligonucleotide:

[chemical structure]

J may include one or more phosphates or phosphorothioates linking to the oligonucleotide. J may include one or more phosphates linking to the oligonucleotide. J may include a phosphate linking to the oligonucleotide. J may include one or more phosphorothioates linking to the oligonucleotide. J may include a phosphorothioate linking to the oligonucleotide.

[0138] Some embodiments include the following, where J is the oligonucleotide:

[chemical structure]

The structure in this compound attached to the oligonucleotide (J) may be referred to as “ETL17,” and is an example of a GalNAc moiety. J may include one or more phosphates or phosphorothioates linking to the oligonucleotide. J may include one or more phosphates linking to the oligonucleotide. J may include a phosphate linking to the oligonucleotide. J may include one or more phosphorothioates linking to the oligonucleotide. J may include a phosphorothioate linking to the oligonucleotide.

[0139] Some embodiments include the following, where the phosphate or “5” indicates a connection to the oligonucleotide:

[chemical structure]

[0140] Some embodiments include the following, where the phosphate or “5” indicates a connection to the oligonucleotide:

[chemical structure]

[0141] Some embodiments include the following, where J is the oligonucleotide:

[chemical structure]

include one or more phosphates or phosphorothioates linking to the oligonucleotide. J may include one or more phosphates linking to the oligonucleotide. J may include a phosphate linking to the oligonucleotide.

[0142] J may include one or more phosphorothioates linking to the oligonucleotide. J may include a phosphorothioate linking to the oligonucleotide.

[0143] Some embodiments include the following, where J is the oligonucleotide:

[chemical structure]

[0144] The structure in this compound attached to the oligonucleotide (J) may be referred to as “ETL1,” and is an example of a GalNAc moiety. J may include one or more phosphates or phosphorothioates linking to the oligonucleotide. J may include one or more phosphates linking to the oligonucleotide. J may include a phosphate linking to the oligonucleotide. J may include one or more phosphorothioates linking to the oligonucleotide. J may include a phosphorothioate linking to the oligonucleotide.

3. siRNA modification patterns

[0145] In some embodiments, the composition comprises an oligonucleotide that inhibits the expression of MTRES1, wherein the oligonucleotide comprises an siRNA comprising a sense strand and an antisense strand, wherein the sense strand comprises modification pattern 1S: 5′-NfsnsNfnNfnNfNfNfnNfnNfnNfnNfnNfsnsn-3′ (SEQ ID NO: 2444), wherein “Nf” is a 2′ fluoro-modified nucleoside, “n” is a 2′ O-methyl modified nucleoside, and “s” is a phosphorothioate linkage. In some embodiments, the sense strand comprises modification pattern 2S: 5′-nsnsnnNfnNfNfNfnnnnnnnnnnsnsn-3′ (SEQ ID NO: 2445), wherein “Nf” is a 2′ fluoro-modified nucleoside, “n” is a 2′ O-methyl modified nucleoside, and “s” is a phosphorothioate linkage. In some embodiments, the sense strand comprises modification pattern 3S: 5′-nsnsnnNfnNfnNfnnnnnnnnnnsnsn-3′ (SEQ ID NO: 2446), wherein “Nf” is a 2′ fluoro-modified nucleoside, “n” is a 2′ O-methyl modified nucleoside, and “s” is a phosphorothioate linkage. In some embodiments, the sense strand comprises modification pattern 4S: 5′-NfsnsNfnNfnNfNfNfnNfnNfnNfnNfnNfsnsnN-moiety-3′ (SEQ ID NO: 2447), wherein “Nf” is a 2′ fluoro-modified nucleoside, “n” is a 2′ O-methyl modified nucleoside, “s” is a phosphorothioate linkage, and N comprises one or more nucleosides. In some embodiments, the sense strand comprises modification pattern 5S: 5′-nsnsnnNfnNfNfNfnnnnnnnnnnsnsnN-moiety-3′ (SEQ ID NO: 2448), wherein “Nf” is a 2′ fluoro-modified nucleoside, “n” is a 2′ O-methyl modified nucleoside, “s” is a phosphorothioate linkage, and N comprises one or more nucleosides. In some embodiments, the moiety in modification pattern 4S or 5S is a lipophilic moiety. In some embodiments, the moiety in modification pattern 4S or 5S is a lipid moiety. In some embodiments, the sense strand comprises modification pattern 6S: 5′-NfsnsNfnNfnNfnNfnNfnNfnNfnNfnNfsnsn-3′ (SEQ ID NO: 2449), wherein “Nf” is a2′ fluoro-modified nucleoside, “n” is a2′ O-methyl modified nucleoside, and “s” is a phosphorothioate linkage. In some embodiments, the sense strand comprises modification pattern 7S: 5′-nsnsnnNfNfNfNfNfnnnnnnnnnnsnsn-3′ (SEQ ID NO: 2450), wherein “Nf” is a 2′ fluoro-modified nucleoside, “n” is a 2′ O-methyl modified nucleoside, and “s” is a phosphorothioate linkage. In some embodiments, the sense strand comprises modification pattern 8S: 5′-nsnsnnnNfNfNfNfnnnnnnnnnnsnsn-3′ (SEQ ID NO: 2451), wherein “Nf” is a 2′ fluoro-modified nucleoside, “n” is a 2′ O-methyl modified nucleoside, and “s” is a phosphorothioate linkage. In some embodiments, the sense strand comprises modification pattern 9S: 5′-nsnsnnnnNfNfNfNfnnnnnnnnnsnsn-3′ (SEQ ID NO: 2452), wherein “Nf” is a 2′ fluoro-modified nucleoside, “n” is a 2′ O-methyl modified nucleoside, and “s” is a phosphorothioate linkage. In some embodiments, the sense strand comprises modification pattern 10S: 5′-NfsnsnnNfnNfnNfnNfnNfnNfnNfnnsnsn-3′ (SEQ ID NO: 2525), wherein “Nf” is a 2′ fluoro-modified nucleoside, “n” is a 2′ O-methyl modified nucleoside, and “s” is a phosphorothioate linkage. In some embodiments, the sense strand comprises modification pattern 11S: 5′-nsnsNfnNfnNfnNfnNfnNfnnnNfnNfsnsn-3′ (SEQ ID NO: 2526), wherein “Nf” is a 2′ fluoro-modified nucleoside, “n” is a 2′ O-methyl modified nucleoside, and “s” is a phosphorothioate linkage. In some embodiments, the sense strand comprises modification pattern 12S: 5′-NfsnsNfnNfnNfnNfnNfnnnNfnNfnNfsnsn-3′ (SEQ ID NO: 2527), wherein “Nf” is a 2′ fluoro-modified nucleoside, “n” is a 2′ O-methyl modified nucleoside, and “s” is a phosphorothioate linkage. In some embodiments, the sense strand comprises modification pattern 13S: 5′-nsnsnnnnNfnNfnNfnNfnNfnNfnNfsnsn-3′ (SEQ ID NO: 2528), wherein “Nf” is a 2′ fluoro-modified nucleoside, “n” is a 2′ O-methyl modified nucleoside, and “s” is a phosphorothioate linkage. In some embodiments, the sense strand comprises modification pattern 14S: 5′-snnnnnnNfNfNfNfnnnnnnnnnsnsn-3′ (SEQ ID NO: 2529), wherein “Nf” is a 2′ fluoro-modified nucleoside, “n” is a 2′ O-methyl modified nucleoside, and “s” is a phosphorothioate linkage. In some embodiments, the sense strand comprises modification pattern 15S: 5′-snnnnNfNfNfNfNfnnnnnnnnnnsnsn-3′ (SEQ ID NO: 2530), wherein “Nf” is a 2′ fluoro-modified nucleoside, “n” is a 2′ O-methyl modified nucleoside, and “s” is a phosphorothioate linkage. In some embodiments, the sense strand comprises modification pattern 16S: 5′-snnnnNfnNfNfdNnnnnnnnnnnsnsn-3′ (SEQ ID NO: 2531), wherein “Nf” is a 2′ fluoro-modified nucleoside, “dN” is a 2′ deoxy-modified nucleoside, “n” is a 2′ O-methyl modified nucleoside, and “s” is a phosphorothioate linkage. In some embodiments, the sense strand comprises modification pattern 17S: 5′-snnnnnNfNfnNfnnnnnnnnnnsnsn-3′ (SEQ ID NO: 2532), wherein “Nf” is a 2′ fluoro-modified nucleoside, “n” is a 2′ O-methyl modified nucleoside, and “s” is a phosphorothioate linkage. In some embodiments, the sense strand comprises modification pattern 18S: 5′-snnnnnnNfnNfNfnnnnnnnnnsnsn-3′ (SEQ ID NO: 2533), wherein “Nf” is a 2′ fluoro-modified nucleoside, “n” is a 2′ O-methyl modified nucleoside, and “s” is a phosphorothioate linkage. In some embodiments, the sense strand comprises modification pattern 19S: 5′-snnnnNfnNfnNfnNfnnnnnnnnsnsn-3′ (SEQ ID NO: 2534), wherein “Nf” is a 2′ fluoro-modified nucleoside, “n” is a 2′ O-methyl modified nucleoside, and “s” is a phosphorothioate linkage. In some embodiments, the sense strand comprises modification pattern 20S: 5′-snnnnNfnNfnNfnnnnnnnnnnsnsn-3′ (SEQ ID NO: 2535), wherein “Nf” is a 2′ fluoro-modified nucleoside, “n” is a 2′ O-methyl modified nucleoside, and “s” is a phosphorothioate linkage. In some embodiments, the sense strand comprises modification pattern 21S: 5′-snnnnNfNfnnNfNfnnnnnnnnnsnsn-3′ (SEQ ID NO: 2536), wherein “Nf” is a 2′ fluoro-modified nucleoside, “n” is a 2′ O-methyl modified nucleoside, and “s” is a phosphorothioate linkage. In some embodiments, the sense strand comprises modification pattern 22S: 5′-snnnnNfnNfNfNfNfnnnnnnnnsnsn-3′ (SEQ ID NO: 2537), wherein “Nf” is a 2′ fluoro-modified nucleoside, “n” is a 2′ O-methyl modified nucleoside, and “s” is a phosphorothioate linkage. In some embodiments, the sense strand comprises modification pattern 23S: 5′-snnnnnNfnNfNfnnnnnnnnnnsnsn-3′ (SEQ ID NO: 2538), wherein “Nf” is a 2′ fluoro-modified nucleoside, “n” is a 2′ O-methyl modified nucleoside, and “s” is a phosphorothioate linkage. In some embodiments, the sense strand comprises modification pattern 24S: 5′-snnnnnnnNfNfNfNfnnnnnnnnsnsn-3′ (SEQ ID NO: 2539), wherein “Nf” is a 2′ fluoro-modified nucleoside, “n” is a 2′ O-methyl modified nucleoside, and “s” is a phosphorothioate linkage. In some embodiments, the sense strand comprises modification pattern 25S: 5′-snnnnnNfNfNfNfNfnnnnnnnnnsnsn-3′ (SEQ ID NO: 2540), wherein “Nf” is a 2′ fluoro-modified nucleoside, “n” is a 2′ O-methyl modified nucleoside, and “s” is a phosphorothioate linkage. In some embodiments, the sense strand comprises modification pattern 26S: 5′-snnnnnNfNfNfNfnnnnnnnnnnsnsn-3′ (SEQ ID NO: 2541), wherein “Nf” is a 2′ fluoro-modified nucleoside, “n” is a 2′ O-methyl modified nucleoside, and “s” is a phosphorothioate linkage. In some embodiments, the sense strand comprises modification pattern 27S: 5′-snnnnnnnNfNfnNfnnnnnnnnsnsn-3′ (SEQ ID NO: 2542), wherein “Nf” is a 2′ fluoro-modified nucleoside, “n” is a 2′ O-methyl modified nucleoside, and “s” is a phosphorothioate linkage. In some embodiments, the sense strand comprises modification pattern 28S: 5′-snnnnNfNfnNfNfnNfnnnnnnnnsnsn-3′ (SEQ ID NO: 2543), wherein “Nf” is a 2′ fluoro-modified nucleoside, “n” is a 2′ O-methyl modified nucleoside, and “s” is a phosphorothioate linkage. In some embodiments, the sense strand comprises modification pattern 29S: 5′-snnnnnnnnNfnNfnnnnnnnnsnsn-3′ (SEQ ID NO: 2544), wherein “Nf” is a 2′ fluoro-modified nucleoside, “n” is a 2′ O-methyl modified nucleoside, and “s” is a phosphorothioate linkage. In some embodiments, the sense strand comprises modification pattern 30S: 5′-snnnnNfNfnNfnNfnnnnnnnnsnsn-3′ (SEQ ID NO: 2545), wherein “Nf” is a 2′ fluoro-modified nucleoside, “n” is a 2′ O-methyl modified nucleoside, and “s” is a phosphorothioate linkage. In some embodiments, the sense strand comprises modification pattern 31S: 5′-snnnnNfNfnNfNfnnnnnnnnnnsnsn-3′ (SEQ ID NO: 2546), wherein “Nf” is a 2′ fluoro-modified nucleoside, “n” is a 2′ O-methyl modified nucleoside, and “s” is a phosphorothioate linkage. In some embodiments, the sense strand comprises modification pattern 32S: 5′-snnnnnnNfNfdNNfnnnnnnnnnsnsn-3′ (SEQ ID NO: 2547), wherein “Nf” is a 2′ fluoro-modified nucleoside, “dN” is a 2′ deoxy-modified nucleoside, “n” is a 2′ O-methyl modified nucleoside, and “s” is a phosphorothioate linkage.

[0146] In some embodiments, the composition comprises an oligonucleotide that inhibits the expression of MTRES1, wherein the oligonucleotide comprises an siRNA comprising a sense strand and an antisense strand, wherein the antisense strand comprises modification pattern 1AS: 5′-nsNfsnNfnNfnNfnNfnnnNfnNfnNfnsnsn-3′ (SEQ ID NO: 2453), wherein “Nf” is a 2′ fluoro-modified nucleoside, “n” is a 2′ O-methyl modified nucleoside, and “s” is a phosphorothioate linkage. In some embodiments, the antisense strand comprises modification pattern 2AS: 5′-nsNfsnnnNfnNfNfnnnnNfnNfnnnsnsn-3′ (SEQ ID NO: 2454), wherein “Nf” is a 2′ fluoro-modified nucleoside, “n” is a 2′ O-methyl modified nucleoside, and “s” is a phosphorothioate linkage. In some embodiments, the antisense strand comprises modification pattern 3AS: 5′-nsNfsnnnNfnnnnnnnNfnNfnnnsnsn-3′ (SEQ ID NO: 2455), wherein “Nf” is a 2′ fluoro-modified nucleoside, “n” is a 2′ O-methyl modified nucleoside, and “s” is a phosphorothioate linkage. In some embodiments, the antisense strand comprises modification pattern 4AS: 5′-nsNfsnNfnNfnnnnnnnNfnNfnnnsnsn-3′ (SEQ ID NO: 2456), wherein “Nf” is a 2′ fluoro-modified nucleoside, “n” is a 2′ O-methyl modified nucleoside, and “s” is a phosphorothioate linkage. In some embodiments, the antisense strand comprises modification pattern 5AS: 5′-nsNfsnnnnnnnnnnnNfnNfnnnsnsn-3′ (SEQ ID NO: 2457), wherein “Nf” is a 2′ fluoro-modified nucleoside, “n” is a 2′ O-methyl modified nucleoside, and “s” is a phosphorothioate linkage. In some embodiments, the antisense strand comprises modification pattern 6AS: 5′-nsNfsnnnNfnnNfnnnnNfnNfnnnsnsn-3′ (SEQ ID NO: 2458), wherein “Nf” is a 2′ fluoro-modified nucleoside, “n” is a 2′ O-methyl modified nucleoside, and “s” is a phosphorothioate linkage. In some embodiments, the antisense strand comprises modification pattern 7AS: 5′-nsNfsnNfnNfnNfnNfnNfnNfnNfnNfnsnsn-3′ (SEQ ID NO: 2459), wherein “Nf” is a 2′ fluoro-modified nucleoside, “n” is a 2′ O-methyl modified nucleoside, and “s” is a phosphorothioate linkage. In some embodiments, the antisense strand comprises modification pattern 8AS: 5′-nsNfsnnnnnnnnnnnNfnnnnnsnsn-3′ (SEQ ID NO: 2460), wherein “Nf” is a 2′ fluoro-modified nucleoside, “n” is a 2′ O-methyl modified nucleoside, and “s” is a phosphorothioate linkage. In some embodiments, the antisense strand comprises modification pattern 9AS: 5′-nsNfsnnnNfnNfnnnnnNfnNfnnnsnsn-3′ (SEQ ID NO: 2548), wherein “Nf” is a 2′ fluoro-modified nucleoside, “n” is a 2′ O-methyl modified nucleoside, and “s” is a phosphorothioate linkage. In some embodiments, the antisense strand comprises modification pattern 10AS: 5′-nsNfsnNfsnNfnNfnNfnNfnNfnNfnNfnsnsn-3′ (SEQ ID NO: 2549), wherein “Nf” is a 2′ fluoro-modified nucleoside, “n” is a 2′ O-methyl modified nucleoside, and “s” is a phosphorothioate linkage.

[0147] In some embodiments, the composition comprises an oligonucleotide that inhibits the expression of MTRES1, wherein the oligonucleotide comprises an siRNA comprising a sense strand and an antisense strand, wherein the sense strand comprises pattern 1S and the antisense strand comprises pattern 1AS, 2AS, 3AS, 4AS, 5AS, 6AS, 7AS, 8AS, 9AS or 10AS. In some embodiments, the sense strand comprises pattern 2S and the antisense strand comprises pattern 1AS, 2AS, 3AS, 4AS, 5AS, 6AS, 7AS, 8AS, 9AS or 10AS. In some embodiments, the sense strand comprises pattern 3S and the antisense strand comprises pattern 1AS, 2AS, 3AS, 4AS, 5AS, 6AS, 7AS, 8AS, 9AS or 10AS. In some embodiments, the sense strand comprises pattern 4S and the antisense strand comprises pattern 1AS, 2AS, 3AS, 4AS, 5AS, 6AS, 7AS, 8AS, 9AS or 10AS. In some embodiments, the sense strand comprises pattern 5S and the antisense strand comprises pattern 1AS, 2AS, 3AS, 4AS, 5AS, 6AS, 7AS, 8AS, 9AS or 10AS. In some embodiments, the sense strand comprises pattern 6S and the antisense strand comprises pattern 1AS, 2AS, 3AS, 4AS, 5AS, 6AS, 7AS, 8AS, 9AS or 10AS. In some embodiments, the sense strand comprises pattern 7S and the antisense strand comprises pattern 1AS, 2AS, 3AS, 4AS, 5AS, 6AS, 7AS, 8AS, 9AS or 10AS.

[0148] In some embodiments, the sense strand comprises pattern 8S and the antisense strand comprises pattern 1AS, 2AS, 3AS, 4AS, 5AS, 6AS, 7AS, 8AS, 9AS or 10AS. In some embodiments, the sense strand comprises pattern 9S and the antisense strand comprises pattern 1AS, 2AS, 3AS, 4AS, 5AS, 6AS, 7AS, 8AS, 9AS or 10AS. In some embodiments, the sense strand comprises pattern 10S and the antisense strand comprises pattern 1AS, 2AS, 3AS, 4AS, 5AS, 6AS, 7AS, 8AS, 9AS or 10AS. In some embodiments, the sense strand comprises pattern 11S and the antisense strand comprises pattern 1AS, 2AS, 3AS, 4AS, 5AS, 6AS, 7AS, 8AS, 9AS or 10AS. In some embodiments, the sense strand comprises pattern 12S and the antisense strand comprises pattern 1AS, 2AS, 3AS, 4AS, 5AS, 6AS, 7AS, 8AS, 9AS or 10AS. In some embodiments, the sense strand comprises pattern 13S and the antisense strand comprises pattern 1AS, 2AS, 3AS, 4AS, 5AS, 6AS, 7AS, 8AS, 9AS or 10AS. In some embodiments, the sense strand comprises pattern 14S and the antisense strand comprises pattern 1AS, 2AS, 3AS, 4AS, 5AS, 6AS, 7AS, 8AS, 9AS or 10AS. In some embodiments, the sense strand comprises pattern 15S and the antisense strand comprises pattern 1AS, 2AS, 3AS, 4AS, 5AS, 6AS, 7AS, 8AS, 9AS or 10AS. In some embodiments, the sense strand comprises pattern 16S and the antisense strand comprises pattern 1AS, 2AS, 3AS, 4AS, 5AS, 6AS, 7AS, 8AS, 9AS or 10AS. In some embodiments, the sense strand comprises pattern 17S and the antisense strand comprises pattern 1AS, 2AS, 3AS, 4AS, 5AS, 6AS, 7AS, 8AS, 9AS or 10AS. In some embodiments, the sense strand comprises pattern 18S and the antisense strand comprises pattern 1AS, 2AS, 3AS, 4AS, 5AS, 6AS, 7AS, 8AS, 9AS or 10AS. In some embodiments, the sense strand comprises pattern 19S and the antisense strand comprises pattern 1AS, 2AS, 3AS, 4AS, 5AS, 6AS, 7AS, 8AS, 9AS or 10AS. In some embodiments, the sense strand comprises pattern 20S and the antisense strand comprises pattern 1AS, 2AS, 3AS, 4AS, 5AS, 6AS, 7AS, 8AS, 9AS or 10AS. In some embodiments, the sense strand comprises pattern 21S and the antisense strand comprises pattern 1AS, 2AS, 3AS, 4AS, 5AS, 6AS, 7AS, 8AS, 9AS or 10AS. In some embodiments, the sense strand comprises pattern 22S and the antisense strand comprises pattern 1AS, 2AS, 3AS, 4AS, 5AS, 6AS, 7AS, 8AS, 9AS or 10AS. In some embodiments, the sense strand comprises pattern 23S and the antisense strand comprises pattern 1AS, 2AS, 3AS, 4AS, 5AS, 6AS, 7AS, 8AS, 9AS or 10AS. In some embodiments, the sense strand comprises pattern 24S and the antisense strand comprises pattern 1AS, 2AS, 3AS, 4AS, 5AS, 6AS, 7AS, 8AS, 9AS or 10AS. In some embodiments, the sense strand comprises pattern 25S and the antisense strand comprises pattern 1AS, 2AS, 3AS, 4AS, 5AS, 6AS, 7AS, 8AS, 9AS or 10AS. In some embodiments, the sense strand comprises pattern 26S and the antisense strand comprises pattern 1AS, 2AS, 3AS, 4AS, 5AS, 6AS, 7AS, 8AS, 9AS or 10AS. In some embodiments, the sense strand comprises pattern 27S and the antisense strand comprises pattern 1AS, 2AS, 3AS, 4AS, 5AS, 6AS, 7AS, 8AS, 9AS or 10AS. In some embodiments, the sense strand comprises pattern 28S and the antisense strand comprises pattern 1AS, 2AS, 3AS, 4AS, 5AS, 6AS, 7AS, 8AS, 9AS or 10AS. In some embodiments, the sense strand comprises pattern 29S and the antisense strand comprises pattern 1AS, 2AS, 3AS, 4AS, 5AS, 6AS, 7AS, 8AS, 9AS or 10AS. In some embodiments, the sense strand comprises pattern 30S and the antisense strand comprises pattern 1AS, 2AS, 3AS, 4AS, 5AS, 6AS, 7AS, 8AS, 9AS or 10AS. In some embodiments, the sense strand comprises pattern 31S and the antisense strand comprises pattern 1AS, 2AS, 3AS, 4AS, 5AS, 6AS, 7AS, 8AS, 9AS or 10AS. In some embodiments, the sense strand comprises pattern 32S and the antisense strand comprises pattern 1AS, 2AS, 3AS, 4AS, 5AS, 6AS, 7AS, 8AS, 9AS or 10AS.

[0149] In some embodiments, the sense strand comprises pattern 1S, 2S, 3S, 4S, 5S, 6S, 7S, 8S, 9S, 10S, 11S, 12S, 13S, 14S, 15S, 16S, 17S, 18S, 19S, 20S, 21S, 22S, 23S, 24S, 25S, 26S, 27S, 28S, 29S, 30S, 31S, or 32S and the antisense strand comprises pattern 1AS. In some embodiments, the sense strand comprises pattern 1S, 2S, 3S, 4S, 5S, 6S, 7S, 8S, 9S, 10S, 11S, 12S, 13S, 14S, 15S, 16S, 17S, 18S, 19S, 20S, 21S, 22S, 23S, 24S, 25S, 26S, 27S, 28S, 29S, 30S, 31S, or 32S and the antisense strand comprises pattern 2AS. In some embodiments, the sense strand comprises pattern 1S, 2S, 3S, 4S, 5S, 6S, 7S, 8S, 9S, 10S, 1S, 12S, 13S, 14S, 15S, 16S, 17S, 18S, 19S, 20S, 21S, 22S, 23S, 24S, 25S, 26S, 27S, 28S, 29S, 305, 31S, or 32S and the antisense strand comprises pattern 3AS. In some embodiments, the sense strand comprises pattern 1S, 2S, 3S, 4S, 5S, 6S, 7S, 8S, 9S, 10S, 11S, 125, 135, 145, 155, 165, 175, 185, 195, 205, 21S, 22S, 23S, 24S, 25S, 26S, 27S, 285, 295, 305, 31S, or 32S and the antisense strand comprises pattern 4AS. In some embodiments, the sense strand comprises pattern 1S, 2S, 3S, 4S, 5S, 6S, 7S, 8S, 9S, 10S, 11S, 125, 135, 145, 155, 16S, 17S, 18S, 19S, 20S, 21S, 22S, 23S, 24S, 25S, 26S, 27S, 28S, 29S, 305, 31S, or 32S and the antisense strand comprises pattern 5AS. In some embodiments, the sense strand comprises pattern 1S, 2S, 3S, 4S, 5S, 6S, 7S, 8S, 9S, 10S, 11S, 125, 135, 145, 155, 165, 175, 185, 195, 205, 21S, 22S, 23S, 24S, 25S, 26S, 27S, 28S, 29S, 305, 31S, or 32S and the antisense strand comprises pattern 6AS. In some embodiments, the sense strand comprises pattern 1S, 2S, 3S, 4S, 5S, 6S, 7S, 8S, 9S, 10S, 11S, 125, 135, 145, 155, 16S, 17S, 18S, 195, 205, 215, 22S, 23S, 24S, 25S, 26S, 27S, 28S, 29S, 305, 31S, or 32S and the antisense strand comprises pattern 7AS. In some embodiments, the sense strand comprises pattern 1S, 2S, 3S, 4S, 5S, 6S, 7S, 8S, 9S, 10S, 11S, 125, 135, 14S, 15S, 165, 175, 185, 195, 205, 21S, 22S, 23S, 24S, 25S, 26S, 27S, 28S, 29S, 305, 31S, or 32S and the antisense strand comprises pattern 8AS. In some embodiments, the sense strand comprises pattern 1S, 2S, 3S, 4S, 5S, 6S, 7S, 8S, 9S, 10S, S, 125, 135, 145, 155, 165, 175, 185, 19S, 20S, 215, 22S, 23S, 24S, 25S, 26S, 27S, 28S, 29S, 305, 31S, or 32S and the antisense strand comprises pattern 9AS. In some embodiments, the sense strand comprises pattern 1S, 2S, 3S, 4S, 5S, 6S, 7S, 8S, 9S, 10S, 11S, 125, 135, 145, 155, 165, 175, 185, 195, 205, 21S, 22S, 23S, 24S, 25S, 26S, 27S, 28S, 29S, 305, 31S, or 32S and the antisense strand comprises pattern 10AS.

[0150] In some embodiments, the sense strand comprises any one of modification patters 1S, 2S, 3S, 4S, 5S, 6S, 7S, 8S, or 9S. In some embodiments, the sense strand comprises any one of modification patters 1S, 2S, 3S, 4S, 5S, 6S, 7S, 8S, 9S, 10S, S, 125, 135, 145, 155, 165, 175, 185, 195, 20S, 21S, 22S, 23S, 24S, 25S, 26S, 27S, 28S, 29S, 305, 315, or 32S. In some embodiments, the sense strand comprises modification pattern 1AS, 2AS, 3AS, 4AS, 5AS, 6AS, 7AS, or 8AS. In some embodiments, the antisense strand comprises modification pattern 1AS, 2AS, 3AS, 4AS, 5AS, 6AS, 7AS, 8AS, 9AS or 10AS. In some embodiments, the antisense strand comprises modification pattern 1AS, 2AS, 3AS, 4AS, 5AS, 6AS, 7AS, or 8AS. In some embodiments, the antisense strand comprises modification pattern 1S, 2S, 3S, 4S, 5S, 6S, 7S, 8S, 9S, 10S, 11S, 12S, 13S, 145, 155, 16S, 17S, 185, 195,205, 215, 22S, 23S, 24S, 25S, 26S, 27S, 28S, 29S, 305, 315, or 32S. In some embodiments, the sense strand or the antisense strand comprises modification pattern ASO1.

[0151] In some embodiments, purines of the sense strand comprise 2′ fluoro modified purines. In some embodiments, purines of the sense strand comprise 2′-O-methyl modified purines. In some embodiments, purines of the sense strand comprise a mixture of 2′ fluoro and 2′-O-methyl modified purines. In some embodiments, all purines of the sense strand comprise 2′ fluoro modified purines. In some embodiments, all purines of the sense strand comprise 2′-O-methyl modified purines. In some embodiments, all purines of the sense strand comprise a mixture of 2′ fluoro and 2′-O-methyl modified purines.

[0152] In some embodiments, pyrimidines of the sense strand comprise 2′ fluoro modified pyrimidines. In some embodiments, pyrimidines of the sense strand comprise 2′-O-methyl modified pyrimidines. In some embodiments, pyrimidines of the sense strand comprise a mixture of 2′ fluoro and 2′-O-methyl modified pyrimidines. In some embodiments, all pyrimidines of the sense strand comprise 2′ fluoro modified pyrimidines. In some embodiments, all pyrimidines of the sense strand comprise 2′-O-methyl modified pyrimidines. In some embodiments, all pyrimidines of the sense strand comprise a mixture of 2′ fluoro and 2′-O-methyl modified pyrimidines.

[0153] In some embodiments, purines of the sense strand comprise 2′ fluoro modified purines, and pyrimidines of the sense strand comprise a mixture of 2′ fluoro and 2′-O-methyl modified pyrimidines. In some embodiments, purines of the sense strand comprise 2′-O-methyl modified purines, and pyrimidines of the sense strand comprise a mixture of 2′ fluoro and 2′-O-methyl modified pyrimidines. In some embodiments, purines of the sense strand comprise 2′ fluoro modified purines, and pyrimidines of the sense strand comprise 2′-O-methyl modified pyrimidines. In some embodiments, purines of the sense strand comprise 2′-O-methyl modified purines, and pyrimidines of the sense strand comprise 2′ fluoro modified pyrimidines. In some embodiments, pyrimidines of the sense strand comprise 2′ fluoro modified pyrimidines, and purines of the sense strand comprise a mixture of 2′ fluoro and 2′-O-methyl modified purines. In some embodiments, pyrimidines of the sense strand comprise 2′-O-methyl modified pyrimidines, and purines of the sense strand comprise a mixture of 2′ fluoro and 2′-O-methyl modified purines. In some embodiments, pyrimidines of the sense strand comprise 2′ fluoro modified pyrimidines, and purines of the sense strand comprise 2′-O-methyl modified purines. In some embodiments, pyrimidines of the sense strand comprise 2′-O-methyl modified pyrimidines, and purines of the sense strand comprise 2′ fluoro modified purines.

[0154] In some embodiments, all purines of the sense strand comprise 2′ fluoro modified purines, and all pyrimidines of the sense strand comprise a mixture of 2′ fluoro and 2′-O-methyl modified pyrimidines. In some embodiments, all purines of the sense strand comprise 2′-O-methyl modified purines, and all pyrimidines of the sense strand comprise a mixture of 2′ fluoro and 2′-O-methyl modified pyrimidines. In some embodiments, all purines of the sense strand comprise 2′ fluoro modified purines, and all pyrimidines of the sense strand comprise 2′-O-methyl modified pyrimidines. In some embodiments, all purines of the sense strand comprise 2′-O-methyl modified purines, and all pyrimidines of the sense strand comprise 2′ fluoro modified pyrimidines. In some embodiments, all pyrimidines of the sense strand comprise 2′ fluoro modified pyrimidines, and all purines of the sense strand comprise a mixture of 2′ fluoro and 2′-O-methyl modified purines. In some embodiments, all pyrimidines of the sense strand comprise 2′-O-methyl modified pyrimidines, and all purines of the sense strand comprise a mixture of 2′ fluoro and 2′-O-methyl modified purines. In some embodiments, all pyrimidines of the sense strand comprise 2′ fluoro modified pyrimidines, and all purines of the sense strand comprise 2′-O-methyl modified purines. In some embodiments, all pyrimidines of the sense strand comprise 2′-O-methyl modified pyrimidines, and all purines of the sense strand comprise 2′ fluoro modified purines.

[0155] In some embodiments, purines of the antisense strand comprise 2′ fluoro modified purines. In some embodiments, purines of the antisense strand comprise 2′-O-methyl modified purines. In some embodiments, purines of the antisense strand comprise a mixture of 2′ fluoro and 2′-O-methyl modified purines. In some embodiments, all purines of the antisense strand comprise 2′ fluoro modified purines. In some embodiments, all purines of the antisense strand comprise 2′-O-methyl modified purines. In some embodiments, all purines of the antisense strand comprise a mixture of 2′ fluoro and 2′-O-methyl modified purines.

[0156] In some embodiments, pyrimidines of the antisense strand comprise 2′ fluoro modified pyrimidines. In some embodiments, pyrimidines of the antisense strand comprise 2′-O-methyl modified pyrimidines. In some embodiments, pyrimidines of the antisense strand comprise a mixture of 2′ fluoro and 2′-O-methyl modified pyrimidines. In some embodiments, all pyrimidines of the antisense strand comprise 2′ fluoro modified pyrimidines. In some embodiments, all pyrimidines of the antisense strand comprise 2′-O-methyl modified pyrimidines. In some embodiments, all pyrimidines of the antisense strand comprise a mixture of 2′ fluoro and 2′-O-methyl modified pyrimidines.

[0157] In some embodiments, purines of the antisense strand comprise 2′ fluoro modified purines, and pyrimidines of the antisense strand comprise a mixture of 2′ fluoro and 2′-O-methyl modified pyrimidines. In some embodiments, purines of the antisense strand comprise 2′-O-methyl modified purines, and pyrimidines of the antisense strand comprise a mixture of 2′ fluoro and 2′-O-methyl modified pyrimidines. In some embodiments, purines of the antisense strand comprise 2′ fluoro modified purines, and pyrimidines of the antisense strand comprise 2′-O-methyl modified pyrimidines. In some embodiments, purines of the antisense strand comprise 2′-O-methyl modified purines, and pyrimidines of the antisense strand comprise 2′ fluoro modified pyrimidines. In some embodiments, pyrimidines of the antisense strand comprise 2′ fluoro modified pyrimidines, and purines of the antisense strand comprise a mixture of 2′ fluoro and 2′-O-methyl modified purines. In some embodiments, pyrimidines of the antisense strand comprise 2′-O-methyl modified pyrimidines, and purines of the antisense strand comprise a mixture of 2′ fluoro and 2′-O-methyl modified purines. In some embodiments, pyrimidines of the antisense strand comprise 2′ fluoro modified pyrimidines, and purines of the antisense strand comprise 2′-O-methyl modified purines. In some embodiments, pyrimidines of the antisense strand comprise 2′-O-methyl modified pyrimidines, and purines of the antisense strand comprise 2′ fluoro modified purines.

[0158] In some embodiments, all purines of the antisense strand comprise 2′ fluoro modified purines, and all pyrimidines of the antisense strand comprise a mixture of 2′ fluoro and 2′-O-methyl modified pyrimidines. In some embodiments, all purines of the antisense strand comprise 2′-O-methyl modified purines, and all pyrimidines of the antisense strand comprise a mixture of 2′ fluoro and 2′-O-methyl modified pyrimidines. In some embodiments, all purines of the antisense strand comprise 2′ fluoro modified purines, and all pyrimidines of the antisense strand comprise 2′-O-methyl modified pyrimidines. In some embodiments, all purines of the antisense strand comprise 2′-O-methyl modified purines, and all pyrimidines of the antisense strand comprise 2′ fluoro modified pyrimidines. In some embodiments, all pyrimidines of the antisense strand comprise 2′ fluoro modified pyrimidines, and all purines of the antisense strand comprise a mixture of 2′ fluoro and 2′-O-methyl modified purines. In some embodiments, all pyrimidines of the antisense strand comprise 2′-O-methyl modified pyrimidines, and all purines of the antisense strand comprise a mixture of 2′ fluoro and 2′-O-methyl modified purines. In some embodiments, all pyrimidines of the antisense strand comprise 2′ fluoro modified pyrimidines, and all purines of the antisense strand comprise 2′-O-methyl modified purines. In some embodiments, all pyrimidines of the antisense strand comprise 2′-O-methyl modified pyrimidines, and all purines of the antisense strand comprise 2′ fluoro modified purines.

[0159] Disclosed herein, in some embodiments, are modified oligonucleotides. The modified oligonucleotide may be an siRNA that includes modifications to the ribose rings, and phosphate linkages. The modifications may be in particular patterns that maximize cell delivery, stability, and efficiency. The siRNA may also include a vinyl phosphonate and a hydrophobic group. These modifications may aid in delivery to a cell or tissue within a subject. The modified oligonucleotide may be used in a method such as a treatment method or a method of reducing gene expression.

[0160] In some embodiments, the oligonucleotide comprises a duplex consisting of 21 nucleotide single strands with base pairing between 19 of the base pairs. In some embodiments, the duplex comprises single-stranded 2 nucleotide overhangs are at the 3′ ends of each strand. One strand (antisense strand) is complementary to a MTRES1 mRNA. Each end of the antisense strand has one to two phosphorothioate bonds. The 5′ end has an optional phosphate mimic such as a vinyl phosphonate. In some embodiments, the oligonucleotide is used to knock down a MTRES1 mRNA or a target protein. In some embodiments, the sense strand has the same sequence as the MTRES1 mRNA. In some embodiments, there are 1-2 phosphorothioates at the 3′ end. In some embodiments, there are 1 or no phosphorothioates at the 5′ end. In some embodiments, there is a hydrophobic conjugate of 12 to 25 carbons attached at the 5′ end via a phosphodiester bond.

[0161] In some cases, the sense strand of any of the siRNAs comprises siRNA with a particular modification pattern. In some embodiments of the modification pattern, position 9 counting from the 5′ end of the sense strand may have a 2′F modification. In some embodiments, when position 9 of the sense strand is a pyrimidine, then all purines in the sense strand have a 2′OMe modification. In some embodiments, when position 9 is the only pyrimidine between positions 5 and 11 of the sense stand, then position 9 is the only position with a 2′F modification in the sense strand. In some embodiments, when position 9 and only one other base between positions 5 and 11 of the sense strand are pyrimidines, then both of these pyrimidines are the only two positions with a 2′F modification in the sense strand. In some embodiments, when position 9 and only two other bases between positions 5 and 11 of the sense strand are pyrimidines, and those two other pyrimidines are in adjacent positions so that there would be not three 2′F modifications in a row, then any combination of 2′F modifications can be made that give three 2′F modifications in total. In some embodiments, when there are more than 2 pyrimidines between positions 5 and 11 of the sense strand, then all combinations of pyrimidines having the 2′F modification are allowed that have three to five 2′F modifications in total, provided that the sense strand does not have three 2′F modifications in a row. In some cases, the sense strand of any of the siRNAs comprises a modification pattern which conforms to any or all of these sense strand rules.

[0162] In some embodiments, when position 9 of the sense strand is a purine, then all purines in the sense strand have a 2′OMe modification. In some embodiments, when position 9 is the only purine between positions 5 and 11 of the sense stand, then position 9 is the only position with a 2′F modification in the sense strand. In some embodiments, when position 9 and only one other base between positions 5 and 11 of the sense strand are purines, then both of these purines are the only two positions with a 2′F modification in the sense strand. In some embodiments, when position 9 and only two other bases between positions 5 and 11 of the sense strand are purines, and those two other purines are in adjacent positions so that there would be not three 2′F modifications in a row, then any combination of 2′F modifications can be made that give three 2′F modifications in total. In some embodiments, when there are more than 2 purines between positions 5 and 11 of the sense strand, then all combinations of purines having the 2′F modification are allowed that have three to five 2′F modifications in total, provided that the sense strand does not have three 2′F modifications in a row. In some cases, the sense strand of any of the siRNAs comprises a modification pattern which conforms to any or all of these sense strand rules.

[0163] In some cases, position 9 of the sense strand can be a 2′deoxy. In these cases, 2′F and 2′OMe modifications may occur at the other positions of the sense strand. In some cases, the sense strand of any of the siRNAs comprises a modification pattern which conforms to these sense strand rules.

[0164] In some cases, the sense strand of any of the siRNAs comprises a modification pattern which conforms to these sense strand rules.

[0165] Terminal modifications useful for modulating activity include modification of the 5′ end of the antisense strand with phosphate or phosphate analogs. In certain embodiments, the 5′ end of the antisense strand is phosphorylated or includes a phosphoryl analog. Exemplary 5′-phosphate modifications include those which are compatible with RNA-induced silencing complex (RISC) mediated gene silencing. In some embodiments, the 3′ end of the antisense strand is phosphorylated or includes a phosphoryl analog. In some embodiments, the 5′ end of the sense strand is phosphorylated or includes a phosphoryl analog. In some embodiments, the 3′ end of the sense strand is phosphorylated or includes a phosphoryl analog.

[0166] In some embodiments, the oligonucleotide comprises a phosphate or phosphate mimic at the 5′ end of the antisense strand. In some embodiment, the phosphate mimic includes a 5′-vinyl phosphonate (VP). In some embodiment, the phosphate mimic is a 5′-VP. In some embodiments, the oligonucleotide comprises a phosphate or phosphate mimic at the 3′ end of the antisense strand. In some embodiments, the oligonucleotide comprises a phosphate or phosphate mimic at the 5′ end of the sense strand. In some embodiments, the oligonucleotide comprises a phosphate or phosphate mimic at the 3′ end of the sense strand.

[0167] Disclosed herein, in some embodiments are compositions comprising an oligonucleotide that targets MTRES1 and when administered to a cell decreases expression of MTRES1, wherein the oligonucleotide comprises a small interfering RNA (siRNA) comprising a sense strand and an antisense strand, wherein the sense strand comprises a sense strand sequence described herein in which at least one internucleoside linkage is modified and at least one nucleoside is modified, or an sense strand sequence comprising 1 or 2 nucleoside substitutions, additions, or deletions of the oligonucleotide sequence in which at least one internucleoside linkage is modified and at least one nucleoside is modified, and wherein the antisense strand comprises an antisense strand sequence described herein in which at least one internucleoside linkage is modified and at least one nucleoside is modified, or an oligonucleotide sequence comprising 1 or 2 nucleoside substitutions, additions, or deletions of the antisense strand sequence in which at least one internucleoside linkage is modified and at least one nucleoside is modified. Some embodiments relate to methods that include administering the composition to a subject.

[0168] In some embodiments, the siRNA comprises the sense strand and/or the antisense strand sequence of an siRNA in Table 8, or a nucleic acid sequence thereof having 3 or 4 nucleoside substitutions, additions, or deletions. In some embodiments, the siRNA comprises the sense strand and/or the antisense strand sequence of an siRNA in Table 8, or a nucleic acid sequence thereof having 1 or 2 nucleoside substitutions, additions, or deletions. In some embodiments, the siRNA comprises the sense strand and/or the antisense strand sequence of an siRNA in Table 8. The siRNA may include the same internucleoside linkage modifications or nucleoside modifications as those in Table 8. The siRNA may include any different internucleoside linkage modifications or nucleoside modifications different from those in Table 8. The siRNA may include some unmodified internucleoside linkages or nucleosides.

[0169] In some embodiments, the siRNA comprises the sense strand and/or the antisense strand sequence of an siRNA in Table 9, or a nucleic acid sequence thereof having 3 or 4 nucleoside substitutions, additions, or deletions. In some embodiments, the siRNA comprises the sense strand and/or the antisense strand sequence of an siRNA in Table 9, or a nucleic acid sequence thereof having 1 or 2 nucleoside substitutions, additions, or deletions. In some embodiments, the siRNA comprises the sense strand and/or the antisense strand sequence of an siRNA in Table 9. The siRNA may include the same internucleoside linkage modifications or nucleoside modifications as those in Table 9. The siRNA may include any different internucleoside linkage modifications or nucleoside modifications different from those in Table 9. The siRNA may include some unmodified internucleoside linkages or nucleosides.

[0170] In some embodiments, the siRNA comprises the sense strand and/or the antisense strand sequence of an siRNA in Table 11A, or a nucleic acid sequence thereof having 3 or 4 nucleoside substitutions, additions, or deletions. In some embodiments, the siRNA comprises the sense strand and/or the antisense strand sequence of an siRNA in Table 11A, or a nucleic acid sequence thereof having 1 or 2 nucleoside substitutions, additions, or deletions. In some embodiments, the siRNA comprises the sense strand and/or the antisense strand sequence of an siRNA in Table 11A. The siRNA may include the same internucleoside linkage modifications or nucleoside modifications as those in Table 11A. The siRNA may include any different internucleoside linkage modifications or nucleoside modifications different from those in Table 11A. The siRNA may include some unmodified internucleoside linkages or nucleosides.

[0171] In some embodiments, the siRNA comprises the sense strand and/or the antisense strand sequence of an siRNA in Table 13A, or a nucleic acid sequence thereof having 3 or 4 nucleoside substitutions, additions, or deletions. In some embodiments, the siRNA comprises the sense strand and/or the antisense strand sequence of an siRNA in Table 13A, or a nucleic acid sequence thereof having 1 or 2 nucleoside substitutions, additions, or deletions. In some embodiments, the siRNA comprises the sense strand and/or the antisense strand sequence of an siRNA in Table 13A. The siRNA may include the same internucleoside linkage modifications or nucleoside modifications as those in Table 13A. The siRNA may include any different internucleoside linkage modifications or nucleoside modifications different from those in Table 13A. The siRNA may include some unmodified internucleoside linkages or nucleosides.

[0172] In some embodiments, the siRNA comprises the sense strand and/or the antisense strand sequence of an siRNA in Table 15A, or a nucleic acid sequence thereof having 3 or 4 nucleoside substitutions, additions, or deletions. In some embodiments, the siRNA comprises the sense strand and/or the antisense strand sequence of an siRNA in Table 15A, or a nucleic acid sequence thereof having 1 or 2 nucleoside substitutions, additions, or deletions. In some embodiments, the siRNA comprises the sense strand and/or the antisense strand sequence of an siRNA in Table 15A. The siRNA may include the same internucleoside linkage modifications or nucleoside modifications as those in Table 15A. The siRNA may include any different internucleoside linkage modifications or nucleoside modifications different from those in Table 15A. The siRNA may include some unmodified internucleoside linkages or nucleosides.

[0173] In some embodiments, the siRNA comprises a sense strand having a sequence in accordance with SEQ ID NO: 2472. In some embodiments, the sense strand sequence comprises or consists of sequence at least 75% identical to SEQ ID NO: 2472, at least 80% identical to SEQ ID NO: 2472, at least 85% identical to SEQ ID NO: 2472, at least 90% identical to SEQ ID NO: 2472, or at least 95% identical to SEQ ID NO: 2472. In some embodiments, the sense strand sequence comprises or consists of the sequence of SEQ ID NO 2472, or a sense strand sequence thereof having 1, 2, 3, or 4 nucleoside substitutions, additions, or deletions. In some embodiments, the sense strand sequence comprises or consists of the sequence of SEQ ID NO: 2472, or a sense strand sequence thereof having 1 or 2 nucleoside substitutions, additions, or deletions. In some embodiments, the sense strand sequence comprises or consists of a sequence 100% identical to SEQ ID NO: 2472. The sense strand may comprise a moiety such as a GalNAc moiety or a lipid moiety. In some embodiments, the siRNA comprises an antisense strand having a sequence in accordance with SEQ ID NO: 2489. In some embodiments, the antisense strand sequence comprises or consists of sequence at least 75% identical to SEQ ID NO: 2489, at least 80% identical to SEQ ID NO: 2489, at least 85% identical to SEQ ID NO: 2489, at least 90% identical to SEQ ID NO: 2489, or at least 95% identical to SEQ ID NO: 2489. In some embodiments, the antisense strand sequence comprises or consists of the sequence of SEQ ID NO 2489, or an antisense strand sequence thereof having 1, 2, 3, or 4 nucleoside substitutions, additions, or deletions. In some embodiments, the antisense strand sequence comprises or consists of the sequence of SEQ ID NO: 2489, or an antisense strand sequence thereof having 1 or 2 nucleoside substitutions, additions, or deletions. In some embodiments, the antisense strand sequence comprises or consists of a sequence 100% identical to SEQ ID NO: 2489. The antisense strand may comprise a moiety such as a GalNAc moiety or a lipid moiety.

[0174] In some embodiments, the siRNA comprises a sense strand having a sequence in accordance with SEQ ID NO: 2478. In some embodiments, the sense strand sequence comprises or consists of sequence at least 75% identical to SEQ ID NO: 2478, at least 80% identical to SEQ ID NO: 2478, at least 85% identical to SEQ ID NO: 2478, at least 90% identical to SEQ ID NO: 2478, or at least 95% identical to SEQ ID NO: 2478. In some embodiments, the sense strand sequence comprises or consists of the sequence of SEQ ID NO 2478, or a sense strand sequence thereof having 1, 2, 3, or 4 nucleoside substitutions, additions, or deletions. In some embodiments, the sense strand sequence comprises or consists of the sequence of SEQ ID NO: 2478, or a sense strand sequence thereof having 1 or 2 nucleoside substitutions, additions, or deletions. In some embodiments, the sense strand sequence comprises or consists of a sequence 100% identical to SEQ ID NO: 2478. The sense strand may comprise a moiety such as a GalNAc moiety or a lipid moiety. In some embodiments, the siRNA comprises an antisense strand having a sequence in accordance with SEQ ID NO: 2495. In some embodiments, the antisense strand sequence comprises or consists of sequence at least 75% identical to SEQ ID NO: 2495, at least 80% identical to SEQ ID NO: 2495, at least 85% identical to SEQ ID NO: 2495, at least 90% identical to SEQ ID NO: 2495, or at least 95% identical to SEQ ID NO: 2495. In some embodiments, the antisense strand sequence comprises or consists of the sequence of SEQ ID NO 2495, or an antisense strand sequence thereof having 1, 2, 3, or 4 nucleoside substitutions, additions, or deletions. In some embodiments, the antisense strand sequence comprises or consists of the sequence of SEQ ID NO: 2495, or an antisense strand sequence thereof having 1 or 2 nucleoside substitutions, additions, or deletions. In some embodiments, the antisense strand sequence comprises or consists of a sequence 100% identical to SEQ ID NO: 2495. The antisense strand may comprise a moiety such as a GalNAc moiety or a lipid moiety.

[0175] In some embodiments, the siRNA comprises a sense strand having a sequence in accordance with SEQ ID NO: 2479. In some embodiments, the sense strand sequence comprises or consists of sequence at least 75% identical to SEQ ID NO: 2479, at least 80% identical to SEQ ID NO: 2479, at least 85% identical to SEQ ID NO: 2479, at least 90% identical to SEQ ID NO: 2479, or at least 95% identical to SEQ ID NO: 2479. In some embodiments, the sense strand sequence comprises or consists of the sequence of SEQ ID NO 2479, or a sense strand sequence thereof having 1, 2, 3, or 4 nucleoside substitutions, additions, or deletions. In some embodiments, the sense strand sequence comprises or consists of the sequence of SEQ ID NO: 2479, or a sense strand sequence thereof having 1 or 2 nucleoside substitutions, additions, or deletions. In some embodiments, the sense strand sequence comprises or consists of a sequence 100% identical to SEQ ID NO: 2479. The sense strand may comprise a moiety such as a GalNAc moiety or a lipid moiety. In some embodiments, the siRNA comprises an antisense strand having a sequence in accordance with SEQ ID NO: 2496. In some embodiments, the antisense strand sequence comprises or consists of sequence at least 75% identical to SEQ ID NO: 2496, at least 80% identical to SEQ ID NO: 2496, at least 85% identical to SEQ ID NO: 2496, at least 90% identical to SEQ ID NO: 2496, or at least 95% identical to SEQ ID NO: 2496. In some embodiments, the antisense strand sequence comprises or consists of the sequence of SEQ ID NO 2496, or an antisense strand sequence thereof having 1, 2, 3, or 4 nucleoside substitutions, additions, or deletions. In some embodiments, the antisense strand sequence comprises or consists of the sequence of SEQ ID NO: 2496, or an antisense strand sequence thereof having 1 or 2 nucleoside substitutions, additions, or deletions. In some embodiments, the antisense strand sequence comprises or consists of a sequence 100% identical to SEQ ID NO: 2496. The antisense strand may comprise a moiety such as a GalNAc moiety or a lipid moiety.

[0176] In some embodiments, the siRNA comprises a sense strand having a sequence in accordance with SEQ ID NO: 2480. In some embodiments, the sense strand sequence comprises or consists of sequence at least 75% identical to SEQ ID NO: 2480, at least 80% identical to SEQ ID NO: 2480, at least 85% identical to SEQ ID NO: 2480, at least 90% identical to SEQ ID NO: 2480, or at least 95% identical to SEQ ID NO: 2480. In some embodiments, the sense strand sequence comprises or consists of the sequence of SEQ ID NO 2480, or a sense strand sequence thereof having 1, 2, 3, or 4 nucleoside substitutions, additions, or deletions. In some embodiments, the sense strand sequence comprises or consists of the sequence of SEQ ID NO: 2480, or a sense strand sequence thereof having 1 or 2 nucleoside substitutions, additions, or deletions. In some embodiments, the sense strand sequence comprises or consists of a sequence 100% identical to SEQ ID NO: 2480. The sense strand may comprise a moiety such as a GalNAc moiety or a lipid moiety. In some embodiments, the siRNA comprises an antisense strand having a sequence in accordance with SEQ ID NO: 2497. In some embodiments, the antisense strand sequence comprises or consists of sequence at least 75% identical to SEQ ID NO: 2497, at least 80% identical to SEQ ID NO: 2497, at least 85% identical to SEQ ID NO: 2497, at least 90% identical to SEQ ID NO: 2497, or at least 95% identical to SEQ ID NO: 2497. In some embodiments, the antisense strand sequence comprises or consists of the sequence of SEQ ID NO 2497, or an antisense strand sequence thereof having 1, 2, 3, or 4 nucleoside substitutions, additions, or deletions. In some embodiments, the antisense strand sequence comprises or consists of the sequence of SEQ ID NO: 2497, or an antisense strand sequence thereof having 1 or 2 nucleoside substitutions, additions, or deletions. In some embodiments, the antisense strand sequence comprises or consists of a sequence 100% identical to SEQ ID NO: 2497. The antisense strand may comprise a moiety such as a GalNAc moiety or a lipid moiety.

[0177] In some embodiments, the siRNA comprises a sense strand having a sequence in accordance with SEQ ID NO: 2507. In some embodiments, the sense strand sequence comprises or consists of sequence at least 75% identical to SEQ ID NO: 2507, at least 80% identical to SEQ ID NO: 2507, at least 85% identical to SEQ ID NO: 2507, at least 90% identical to SEQ ID NO: 2507, or at least 95% identical to SEQ ID NO: 2507. In some embodiments, the sense strand sequence comprises or consists of the sequence of SEQ ID NO 2507, or a sense strand sequence thereof having 1, 2, 3, or 4 nucleoside substitutions, additions, or deletions. In some embodiments, the sense strand sequence comprises or consists of the sequence of SEQ ID NO: 2507, or a sense strand sequence thereof having 1 or 2 nucleoside substitutions, additions, or deletions. In some embodiments, the sense strand sequence comprises or consists of a sequence 100% identical to SEQ ID NO: 2507. The sense strand may comprise a moiety such as a GalNAc moiety or a lipid moiety. In some embodiments, the siRNA comprises an antisense strand having a sequence in accordance with SEQ ID NO: 2517. In some embodiments, the antisense strand sequence comprises or consists of sequence at least 75% identical to SEQ ID NO: 2517, at least 80% identical to SEQ ID NO: 2517, at least 85% identical to SEQ ID NO: 2517, at least 90% identical to SEQ ID NO: 2517, or at least 95% identical to SEQ ID NO: 2517. In some embodiments, the antisense strand sequence comprises or consists of the sequence of SEQ ID NO 2517, or an antisense strand sequence thereof having 1, 2, 3, or 4 nucleoside substitutions, additions, or deletions. In some embodiments, the antisense strand sequence comprises or consists of the sequence of SEQ ID NO: 2517, or an antisense strand sequence thereof having 1 or 2 nucleoside substitutions, additions, or deletions. In some embodiments, the antisense strand sequence comprises or consists of a sequence 100% identical to SEQ ID NO: 2517. The antisense strand may comprise a moiety such as a GalNAc moiety or a lipid moiety.

4. ASO modification patterns

[0178] In some embodiments, the composition comprises an oligonucleotide that inhibits the expression of MTRES1, wherein the oligonucleotide comprises an antisense oligonucleotide (ASO). In some embodiments, the ASO comprises modification pattern ASO1: 5′-nsnsnsnsnsdNsdNsdNsdNsdNsdNsdNsdNsdNsdNsnsnsnsnsn-3′ (SEQ ID NO: 2461), wherein “dN” is any deoxynucleotide, “n” is a 2′O-methyl or 2′O-methoxyethyl-modified nucleoside, and “s” is a phosphorothioate linkage. In some embodiments, the ASO comprises modification pattern 1S1S, 2S, 3S, 4S, 5S, 6S, 7S, 8S, 9S, 10S, 11S, 12S, 13S, 14S, 15S, 16S, 17S, 18S, 19S, 20S, 21S, 22S, 23S, 24S, 25S, 26S, 27S, 28S, 29S, 30S, 31S, 32S, 1AS, 2AS, 3AS, 4AS, 5AS, 6AS, 7AS, 8AS, 9AS or 10AS.

### D. Formulations

[0179] In some embodiments, the composition is a pharmaceutical composition. In some embodiments, the composition is sterile. In some embodiments, the composition further comprises a pharmaceutically acceptable carrier.

[0180] In some embodiments, the pharmaceutically acceptable carrier comprises water. In some embodiments, the pharmaceutically acceptable carrier comprises a buffer. In some embodiments, the pharmaceutically acceptable carrier comprises a saline solution. In some embodiments, the pharmaceutically acceptable carrier comprises water, a buffer, or a saline solution. In some embodiments, the composition comprises a liposome. In some embodiments, the pharmaceutically acceptable carrier comprises liposomes, lipids, nanoparticles, proteins, protein-antibody complexes, peptides, cellulose, nanogel, or a combination thereof.

[0181] In some embodiments, the composition is formulated to cross the blood brain barrier. In some embodiments, the composition is formulated for central nervous system (CNS) delivery. In some embodiments, the composition includes a lipophilic compound. The lipophilic compound may be useful for crossing the blood brain barrier or for CNS delivery.

### II. METHODS AND USES

[0182] Disclosed herein, in some embodiments, are methods of administering a composition described herein to a subject. Some embodiments relate to use a composition described herein, such as administering the composition to a subject.

[0183] Some embodiments relate to a method of treating a disorder in a subject in need thereof. Some embodiments relate to use of a composition described herein in the method of treatment. Some embodiments include administering a composition described herein to a subject with the disorder. In some embodiments, the administration treats the disorder in the subject. In some embodiments, the composition treats the disorder in the subject.

[0184] In some embodiments, the treatment comprises prevention, inhibition, or reversion of the disorder in the subject. Some embodiments relate to use of a composition described herein in the method of preventing, inhibiting, or reversing the disorder. Some embodiments relate to a method of preventing, inhibiting, or reversing a disorder a disorder in a subject in need thereof. Some embodiments include administering a composition described herein to a subject with the disorder. In some embodiments, the administration prevents, inhibits, or reverses the disorder in the subject. In some embodiments, the composition prevents, inhibits, or reverses the disorder in the subject.

[0185] Some embodiments relate to a method of preventing a disorder a disorder in a subject in need thereof. Some embodiments relate to use of a composition described herein in the method of preventing the disorder. Some embodiments include administering a composition described herein to a subject with the disorder. In some embodiments, the administration prevents the disorder in the subject. In some embodiments, the composition prevents the disorder in the subject.

[0186] Some embodiments relate to a method of inhibiting a disorder a disorder in a subject in need thereof. Some embodiments relate to use of a composition described herein in the method of inhibiting the disorder. Some embodiments include administering a composition described herein to a subject with the disorder. In some embodiments, the administration inhibits the disorder in the subject. In some embodiments, the composition inhibits the disorder in the subject.

[0187] Some embodiments relate to a method of reversing a disorder a disorder in a subject in need thereof. Some embodiments relate to use of a composition described herein in the method of reversing the disorder. Some embodiments include administering a composition described herein to a subject with the disorder. In some embodiments, the administration reverses the disorder in the subject. In some embodiments, the composition reverses the disorder in the subject.

[0188] In some embodiments, the administration is systemic. In some embodiments, the administration is intravenous. In some embodiments, the administration is by injection.

### A. Disorders

[0189] Some embodiments of the methods described herein include treating a disorder in a subject in need thereof. In some embodiments, the disorder is a neurological disorder. Non-limiting examples of neurological disorders include dementia, Alzheimer's disease, delirium, cognitive decline, vascular dementia, or Parkinson's disease. In some embodiments, the neurological disorder includes cognitive decline. In some embodiments, the neurological disorder includes delirium. In some embodiments, the neurological disorder includes dementia. In some embodiments, the neurological disorder includes vascular dementia. In some embodiments, the neurological disorder includes Alzheimer's disease. In some embodiments, the neurological disorder includes Parkinson's disease. The neurological disorder may include a neurodegenerative disease. The neurological disorder may be characterized by protein aggregation.

### B. Subjects

[0190] Some embodiments of the methods described herein include treatment of a subject. Non-limiting examples of subjects include vertebrates, animals, mammals, dogs, cats, cattle, rodents, mice, rats, primates, monkeys, and humans. In some embodiments, the subject is a vertebrate. In some embodiments, the subject is an animal. In some embodiments, the subject is a mammal. In some embodiments, the subject is a dog. In some embodiments, the subject is a cat. In some embodiments, the subject is a cattle. In some embodiments, the subject is a mouse. In some embodiments, the subject is a rat. In some embodiments, the subject is a primate. In some embodiments, the subject is a monkey. In some embodiments, the subject is an animal, a mammal, a dog, a cat, cattle, a rodent, a mouse, a rat, a primate, or a monkey. In some embodiments, the subject is a human.

[0191] In some embodiments, the subject is male. In some embodiments, the subject is female.

[0192] In some embodiments, the subject is an adult (e.g. at least 18 years old). In some embodiments, the subject is ≥90 years of age. In some embodiments, the subject is ≥85 years of age. In some embodiments, the subject is ≥80 years of age. In some embodiments, the subject is ≥70 years of age. In some embodiments, the subject is ≥60 years of age. In some embodiments, the subject is ≥50 years of age. In some embodiments, the subject is ≥40 years of age. In some embodiments, the subject is ≥30 years of age. In some embodiments, the subject is ≥20 years of age. In some embodiments, the subject is ≥10 years of age. In some embodiments, the subject is ≥1 years of age. In some embodiments, the subject is ≥0 years of age.

[0193] In some embodiments, the subject is ≤100 years of age. In some embodiments, the subject is ≤90 years of age. In some embodiments, the subject is ≤85 years of age. In some embodiments, the subject is ≤80 years of age. In some embodiments, the subject is ≤70 years of age. In some embodiments, the subject is ≤60 years of age. In some embodiments, the subject is ≤50 years of age. In some embodiments, the subject is ≤40 years of age. In some embodiments, the subject is ≤30 years of age. In some embodiments, the subject is ≤20 years of age. In some embodiments, the subject is ≤10 years of age. In some embodiments, the subject is ≤1 years of age.

[0194] In some embodiments, the subject is between 0 and 100 years of age. In some embodiments, the subject is between 20 and 90 years of age. In some embodiments, the subject is between 30 and 80 years of age. In some embodiments, the subject is between 40 and 75 years of age. In some embodiments, the subject is between 50 and 70 years of age. In some embodiments, the subject is between 40 and 85 years of age.

C. Baseline measurements

[0195] Some embodiments of the methods described herein include obtaining a baseline measurement from a subject. For example, in some embodiments, a baseline measurement is obtained from the subject prior to treating the subject. Non-limiting examples of baseline measurements include a baseline cognitive function measurement, a baseline central nervous system (CNS) amyloid plaque measurement, a baseline CNS tau accumulation measurement, a baseline cerebrospinal fluid (CSF) beta-amyloid 42 measurement, a baseline CSF tau measurement, a baseline CSF phospho-tau measurement, a baseline neurofilament light (NfL) measurement. a baseline CSF alpha-synuclein measurement, a baseline Lewy body measurement, a baseline MTRES1 protein measurement, or a baseline MTRES1 mRNA measurement.

[0196] In some embodiments, the baseline measurement is obtained directly from the subject. In some embodiments, the baseline measurement is obtained by observation, for example by observation of the subject or of the subject's tissue. In some embodiments, the baseline measurement is obtained noninvasively using an imaging device.

[0197] In some embodiments, the baseline measurement is obtained in a sample from the subject. In some embodiments, the baseline measurement is obtained in one or more histological tissue sections. In some embodiments, the baseline measurement is obtained by performing an assay such as an immunoassay, a colorimetric assay, or a fluorescence assay, on the sample obtained from the subject. In some embodiments, the baseline measurement is obtained by an immunoassay, a colorimetric assay, a fluorescence assay, or a chromatography (e.g. HPLC) assay. In some embodiments, the baseline measurement is obtained by PCR.

[0198] In some embodiments, the baseline measurement is a baseline cognitive function measurement. The baseline cognitive function measurement may be obtained directly from the subject. For example, the subject may be administered a test. The test may include a cognitive test such as the Montreal Cognitive Assessment (MoCA), Mini-Mental State Exam (MMSE), or Mini-Cog. The test may include assessment of basic cognitive functions such as memory, language, executive frontal lobe function, apraxia, visuospatial ability, behavior, mood, orientation, or attention. The baseline cognitive function measurement may include a score. The baseline cognitive function measurement may be indicative of mild cognitive impairment, or of severe cognitive impairment. The baseline cognitive function measurement may be indicative of a neurological disorder.

[0199] The baseline measurement may include a baseline In some embodiments, the marker of neurodegeneration measurement. Examples of marker of neurodegeneration may include central nervous system (CNS) amyloid plaques, CNS tau accumulation, cerebrospinal fluid (CSF) beta-amyloid 42, CSF tau, CSF phospho-tau, CSF or plasma neurofilament light chain (NfL), Lewy bodies, or CSF alpha-synuclein. Any of these measurements may be reduced in relation to the baseline measurement. Some examples of ways to measure these may include an assay such as a immunoassay, colorimetric assay, or microscopy.

[0200] In some embodiments, the baseline measurement is a baseline amyloid plaque measurement. The baseline amyloid plaque measurement may include a central nervous system (CNS) amyloid plaque measurement. In some embodiments, the baseline amyloid plaque measurement includes a baseline concentration or amount. The baseline amyloid plaque measurement may be performed using an imaging device. The imaging device may include a positron emission tomography (PET) device. The baseline amyloid plaque measurement may be performed on a biopsy. The baseline amyloid plaque measurement may be performed using a spinal tap (for example, when the baseline amyloid plaque measurement includes a baseline cerebrospinal fluid (CSF) amyloid plaque measurement). In some embodiments, the baseline amyloid plaque measurement is obtained by an assay such as an immunoassay. The baseline beta amyloid plaque measurement may be indicative of a neurodegenerative disease such as Alzheimer's disease.

[0201] In some embodiments, the baseline measurement is a baseline beta-amyloid 42 measurement. The baseline beta-amyloid 42 measurement may include a cerebrospinal fluid (CSF) beta-amyloid 42 measurement. In some embodiments, the baseline beta-amyloid 42 measurement includes a baseline concentration or amount. The baseline beta-amyloid 42 measurement may be performed on a biopsy. The baseline beta-amyloid 42 measurement may be performed using a spinal tap (for example, when the baseline beta-amyloid 42 measurement includes a baseline CSF beta-amyloid 42 measurement). In some embodiments, the baseline beta-amyloid 42 measurement is obtained by an assay such as an immunoassay. The baseline beta-amyloid 42 measurement may be indicative of a neurodegenerative disease such as Alzheimer's disease.

[0202] In some embodiments, the baseline measurement is a baseline tau measurement. In some embodiments, the baseline tau measurement includes a baseline concentration or amount. The baseline tau measurement may be performed on a biopsy. In some embodiments, the baseline tau measurement is obtained by an assay such as an immunoassay. The baseline beta tau measurement may be indicative of a neurodegenerative disease such as Alzheimer's disease or Parkinson's disease.

[0203] In some embodiments, the baseline tau measurement is a baseline central nervous system (CNS) tau measurement. The baseline tau measurement may include a baseline total tau measurement. The baseline tau measurement may include a baseline unphosphorylated tau measurement. The baseline tau measurement may include a baseline phosphorylated tau (phospho-tau) measurement. In some embodiments, the baseline tau measurement is a baseline tau accumulation measurement. In some embodiments, the baseline tau measurement is a baseline CNS tau accumulation measurement. The baseline CNS tau accumulation measurement may be indicative of a neurodegenerative disease such as Alzheimer's disease or Parkinson's disease.

[0204] The baseline tau measurement may include a cerebrospinal fluid (CSF) tau measurement. The baseline CSF tau measurement may be performed after use of a spinal tap. The baseline CSF tau measurement may be indicative of a neurodegenerative disease such as Alzheimer's disease or Parkinson's disease.

[0205] The baseline CSF tau measurement may include a baseline CSF phospho-tau measurement. The baseline CSF phospho-tau measurement may include an amount of phospho-tau in relation to total tau or unphosphorylated tau. For example, the baseline CSF phospho-tau measurement may include a phospho-tau/tau ratio. The baseline CSF phospho-tau measurement may be indicative of a neurodegenerative disease such as Alzheimer's disease or Parkinson's disease.

[0206] In some embodiments, the baseline neurofilament light chain (NfL) measurement includes a baseline CSF or plasma NfL measurement. The baseline NfL measurement may be a baseline CSF NfL measurement. The baseline NfL measurement may be a baseline plasma NfL measurement. The NfL measurement may include a concentration or an amount. The baseline NfL measurement may be indicative of a neurodegenerative disease such as Alzheimer's disease or Parkinson's disease.

[0207] In some embodiments, the baseline measurement is a baseline alpha-synuclein measurement. The baseline alpha-synuclein measurement may include a cerebrospinal fluid (CSF) alpha-synuclein measurement. In some embodiments, the baseline alpha-synuclein measurement includes a baseline concentration or amount. The baseline alpha-synuclein measurement may be performed on a biopsy. The baseline alpha-synuclein measurement may be performed using a spinal tap (for example, when the baseline alpha-synuclein measurement includes a baseline CSF alpha-synuclein measurement). In some embodiments, the baseline alpha-synuclein measurement is obtained by an assay such as an immunoassay.

[0208] The baseline alpha-synuclein measurement may be indicative of a neurodegenerative disease such as Parkinson's disease. The baseline alpha-synuclein measurement may be indicative of dementia.

[0209] In some embodiments, the baseline measurement is a baseline Lewy body measurement. The baseline Lewy body measurement may include a central nervous system (CNS) Lewy body measurement.

[0210] In some embodiments, the baseline Lewy body measurement includes a baseline concentration or amount.

[0211] The baseline Lewy body measurement may be performed using an imaging device. The imaging device may include a positron emission tomography (PET) device. The baseline beta Lewy body measurement may be indicative of dementia.

[0212] In some embodiments, the baseline measurement is a baseline MTRES1 protein measurement. In some embodiments, the baseline MTRES1 protein measurement comprises a baseline MTRES1 protein level. In some embodiments, the baseline MTRES1 protein level is indicated as a mass or percentage of MTRES1 protein per sample weight. In some embodiments, the baseline MTRES1 protein level is indicated as a mass or percentage of MTRES1 protein per sample volume. In some embodiments, the baseline MTRES1 protein level is indicated as a mass or percentage of MTRES1 protein per total protein within the sample. In some embodiments, the baseline MTRES1 protein measurement is a baseline CNS or CSF MTRES1 protein measurement. In some embodiments, the baseline MTRES1 protein measurement is obtained by an assay such as an immunoassay, a colorimetric assay, or a fluorescence assay.

[0213] In some embodiments, the baseline measurement is a baseline MTRES1 mRNA measurement. In some embodiments, the baseline MTRES1 mRNA measurement comprises a baseline MTRES1 mRNA level. In some embodiments, the baseline MTRES1 mRNA level is indicated as an amount or percentage of MTRES1 mRNA per sample weight. In some embodiments, the baseline MTRES1 mRNA level is indicated as an amount or percentage of MTRES1 mRNA per sample volume. In some embodiments, the baseline MTRES1 mRNA level is indicated as an amount or percentage of MTRES1 mRNA per total mRNA within the sample. In some embodiments, the baseline MTRES1 mRNA level is indicated as an amount or percentage of MTRES1 mRNA per total nucleic acids within the sample. In some embodiments, the baseline MTRES1 mRNA level is indicated relative to another mRNA level, such as an mRNA level of a housekeeping gene, within the sample. In some embodiments, the baseline MTRES1 mRNA measurement is a baseline CNS or CSF MTRES1 mRNA measurement. In some embodiments, the baseline MTRES1 mRNA measurement is obtained by an assay such as a polymerase chain reaction (PCR) assay. In some embodiments, the PCR comprises quantitative PCR (qPCR). In some embodiments, the PCR comprises reverse transcription of the MTRES1 mRNA.

[0214] Some embodiments of the methods described herein include obtaining a sample from a subject. In some embodiments, the baseline measurement is obtained in a sample obtained from the subject. In some embodiments, the sample is obtained from the subject prior to administration or treatment of the subject with a composition described herein. In some embodiments, a baseline measurement is obtained in a sample obtained from the subject prior to administering the composition to the subject.

[0215] In some embodiments, the sample comprises a fluid. In some embodiments, the sample is a fluid sample. In some embodiments, the fluid sample is a CSF sample. In some embodiments, the fluid sample includes a central nervous system (CNS) fluid sample. The CNS fluid may include cerebrospinal fluid (CSF). In some embodiments, the fluid sample includes a CSF sample. In some embodiments, the sample is a blood, plasma, or serum sample. In some embodiments, the sample comprises blood. In some embodiments, the sample is a blood sample. In some embodiments, the sample is a whole-blood sample.

[0216] In some embodiments, the blood is fractionated or centrifuged. In some embodiments, the sample comprises plasma. In some embodiments, the sample is a plasma sample. A blood sample may be a plasma sample. In some embodiments, the sample comprises serum. In some embodiments, the sample is a serum sample. A blood sample may be a serum sample.

[0217] In some embodiments, the sample comprises a tissue. In some embodiments, the sample is a tissue sample. In some embodiments, the tissue comprises central nervous system (CNS) tissue. For example, the baseline MTRES1 mRNA measurement, or the baseline MTRES1 protein measurement, may be obtained in a CNS tissue sample obtained from the patient. The CNS tissue may include brain tissue. The CNS tissue may include nerve tissue. The CNS tissue may include neurons, glia, microglia, astrocytes, or oligodendrocytes, or a combination thereof. The CNS tissue may include neurons. The CNS tissue may include glia. The CNS tissue may include microglia. The CNS tissue may include astrocytes. The CNS tissue may include oligodendrocytes.

[0218] In some embodiments, the sample includes cells. In some embodiments, the sample comprises a cell. In some embodiments, the cell comprises a CNS cell. The CNS cell may include a brain cell. The CNS cell may include a nerve cell. The CNS cell may be a neuron, glial cell, microglial cell, astrocyte, or oligodendrocyte. The CNS cell may be a neuron. The CNS cell may be a glial cell. The CNS cell may be a microglial cell. The CNS cell may be an astrocyte. The CNS cell may be an oligodendrocyte.

### D. Effects

[0219] In some embodiments, the composition or administration of the composition affects a measurement such as a cognitive function measurement, a central nervous system (CNS) amyloid plaque measurement, a CNS tau accumulation measurement, a cerebrospinal fluid (CSF) beta-amyloid 42 measurement, a CSF tau measurement, a CSF phospho-tau measurement, a NfL measurement, a CSF alpha-synuclein measurement, a Lewy body measurement, a MTRES1 protein measurement, or a MTRES1 mRNA measurement, relative to the baseline measurement.

[0220] Some embodiments of the methods described herein include obtaining the measurement from a subject. For example, the measurement may be obtained from the subject after treating the subject. In some embodiments, the measurement is obtained in a second sample (such as a fluid or tissue sample described herein) obtained from the subject after the composition is administered to the subject. In some embodiments, the measurement is an indication that the disorder has been treated.

[0221] In some embodiments, the measurement is obtained directly from the subject. In some embodiments, the measurement is obtained noninvasively using an imaging device. In some embodiments, the measurement is obtained in a second sample from the subject. In some embodiments, the measurement is obtained in one or more histological tissue sections. In some embodiments, the measurement is obtained by performing an assay on the second sample obtained from the subject. In some embodiments, the measurement is obtained by an assay, such as an assay described herein. In some embodiments, the assay is an immunoassay, a colorimetric assay, a fluorescence assay, a chromatography (e.g. HPLC) assay, or a PCR assay. In some embodiments, the measurement is obtained by an assay such as an immunoassay, a colorimetric assay, a fluorescence assay, or a chromatography (e.g. HPLC) assay. In some embodiments, the measurement is obtained by PCR. In some embodiments, the measurement is obtained by histology. In some embodiments, the measurement is obtained by observation. In some embodiments, additional measurements are made, such as in a 3rd sample, a 4th sample, or a fifth sample.

[0222] In some embodiments, the measurement is obtained within 1 hour, within 2 hours, within 3 hours, within 4 hours, within 5 hours, within 6 hours, within 12 hours, within 18 hours, or within 24 hours after the administration of the composition. In some embodiments, the measurement is obtained within 1 day, within 2 days, within 3 days, within 4 days, within 5 days, within 6 days, or within 7 days after the administration of the composition. In some embodiments, the measurement is obtained within 1 week, within 2 weeks, within 3 weeks, within 1 month, within 2 months, within 3 months, within 6 months, within 1 year, within 2 years, within 3 years, within 4 years, or within 5 years after the administration of the composition. In some embodiments, the measurement is obtained after 1 hour, after 2 hours, after 3 hours, after 4 hours, after 5 hours, after 6 hours, after 12 hours, after 18 hours, or after 24 hours after the administration of the composition. In some embodiments, the measurement is obtained after 1 day, after 2 days, after 3 days, after 4 days, after 5 days, after 6 days, or after 7 days after the administration of the composition. In some embodiments, the measurement is obtained after 1 week, after 2 weeks, after 3 weeks, after 1 month, after 2 months, after 3 months, after 6 months, after 1 year, after 2 years, after 3 years, after 4 years, or after 5 years, following the administration of the composition.

[0223] In some embodiments, the composition reduces the measurement relative to the baseline measurement. For example, an adverse phenotype of a neurological disorder may be reduced upon administration of the composition. The neurological disorder may include dementia, Alzheimer's disease, delirium, cognitive decline, vascular dementia, or Parkinson's disease. In some embodiments, the reduction is measured in a second sample obtained from the subject after administering the composition to the subject. In some embodiments, the reduction is measured directly in the subject after administering the composition to the subject. In some embodiments, the measurement is decreased by about 2.5% or more, about 5% or more, or about 7.5% or more, relative to the baseline measurement. In some embodiments, the measurement is decreased by about 10% or more, relative to the baseline measurement. In some embodiments, the measurement is decreased by about 20% or more, about 30% or more, about 40% or more, about 50% or more, about 60% or more, about 70% or more, about 80% or more, about 90% or more, relative to the baseline measurement. In some embodiments, the measurement is decreased by no more than about 2.5%, no more than about 5%, or no more than about 7.5%, relative to the baseline measurement. In some embodiments, the measurement is decreased by no more than about 10%, relative to the baseline measurement. In some embodiments, the measurement is decreased by no more than about 20%, no more than about 30%, no more than about 40%, no more than about 50%, no more than about 60%, no more than about 70%, no more than about 80%, no more than about 90%, or no more than about 100% relative to the baseline measurement. In some embodiments, the measurement is decreased by 2.5%, 5%, 7.5%, 10%, 20%, 30%, 40%, 50%, 60%, 70%, 80%, 90%, or 100%, or by a range defined by any of the two aforementioned percentages.

[0224] In some embodiments, the composition increases the measurement relative to the baseline measurement. For example, a protective phenotype of a neurological disorder may be increased upon administration of the composition. The neurological disorder may include dementia, Alzheimer's disease, delirium, cognitive decline, vascular dementia, or Parkinson's disease. In some embodiments, the increase is measured in a second sample obtained from the subject after administering the composition to the subject. In some embodiments, the increase is measured directly in the subject after administering the composition to the subject. In some embodiments, the measurement is increased by about 2.5% or more, about 5% or more, or about 7.5% or more, relative to the baseline measurement. In some embodiments, the measurement is increased by about 10% or more, relative to the baseline measurement. In some embodiments, the measurement is increased by about 20% or more, about 30% or more, about 40% or more, about 50% or more, about 60% or more, about 70% or more, about 80% or more, about 90% or more, relative to the baseline measurement. In some embodiments, the measurement is increased by about 100% or more, increased by about 250% or more, increased by about 500% or more, increased by about 750% or more, or increased by about 1000% or more, relative to the baseline measurement. In some embodiments, the measurement is increased by no more than about 2.5%, no more than about 5%, or no more than about 7.5%, relative to the baseline measurement. In some embodiments, the measurement is increased by no more than about 10%, relative to the baseline measurement. In some embodiments, the measurement is increased by no more than about 20%, no more than about 30%, no more than about 40%, no more than about 50%, no more than about 60%, no more than about 70%, no more than about 80%, no more than about 90%, or no more than about 100% relative to the baseline measurement. In some embodiments, the measurement is increased by no more than about 100%, increased by no more than about 250%, increased by no more than about 500%, increased by no more than about 750%, or increased by no more than about 1000%, relative to the baseline measurement. In some embodiments, the measurement is increased by 2.5%, 5%, 7.5%, 10%, 20%, 30%, 40%, 50%, 60%, 70%, 80%, 90%, 100%, 250%, 500%, 750%, or 1000%, or by a range defined by any of the two aforementioned percentages.

[0225] In some embodiments, the measurement is a cognitive function measurement. The cognitive function measurement may be obtained directly from the subject. For example, the subject may be administered a test. The test may include a cognitive test such as the Montreal Cognitive Assessment (MoCA), Mini-Mental State Exam (MMSE), or Mini-Cog. The test may include assessment of basic cognitive functions such as memory, language, executive frontal lobe function, apraxia, visuospatial ability, behavior, mood, orientation, or attention. The cognitive function measurement may include a score. The cognitive function measurement may be indicative of a lack of cognitive impairment. In some embodiments, the cognitive function measurement is indicative of mild cognitive impairment, and the baseline cognitive function measurement is indicative of severe cognitive impairment. The cognitive function measurement may be indicative of a neurological disorder.

[0226] In some embodiments, the composition increases the cognitive function measurement relative to the baseline cognitive function measurement. In some embodiments, the increase is measured directly in the subject after administering the composition to the subject. In some embodiments, the cognitive function measurement is increased by about 2.5% or more, about 5% or more, or about 7.5% or more, relative to the baseline cognitive function measurement. In some embodiments, the cognitive function measurement is increased by about 10% or more, relative to the baseline cognitive function measurement.

[0227] In some embodiments, the cognitive function measurement is increased by about 20% or more, about 30% or more, about 40% or more, about 50% or more, about 60% or more, about 70% or more, about 80% or more, about 90% or more, relative to the baseline cognitive function measurement. In some embodiments, the cognitive function measurement is increased by about 100% or more, increased by about 250% or more, increased by about 500% or more, increased by about 750% or more, or increased by about 1000% or more, relative to the baseline cognitive function measurement. In some embodiments, the cognitive function measurement is increased by no more than about 2.5%, no more than about 5%, or no more than about 7.5%, relative to the baseline cognitive function measurement. In some embodiments, the cognitive function measurement is increased by no more than about 10%, relative to the baseline cognitive function measurement. In some embodiments, the cognitive function measurement is increased by no more than about 20%, no more than about 30%, no more than about 40%, no more than about 50%, no more than about 60%, no more than about 70%, no more than about 80%, no more than about 90%, or no more than about 100% relative to the baseline cognitive function measurement. In some embodiments, the cognitive function measurement is increased by no more than about 100%, increased by no more than about 250%, increased by no more than about 500%, increased by no more than about 750%, or increased by no more than about 1000%, relative to the baseline cognitive function measurement. In some embodiments, the cognitive function measurement is increased by 2.5%, 5%, 7.5%, 10%, 20%, 30%, 40%, 50%, 60%, 70%, 80%, 90%, 100%, 250%, 500%, 750%, or 1000%, or by a range defined by any of the two aforementioned percentages.

[0228] In some embodiments, the measurement is an amyloid plaque measurement. The amyloid plaque measurement may include a central nervous system (CNS) amyloid plaque measurement. In some embodiments, the amyloid plaque measurement includes a concentration or amount. The amyloid plaque measurement may be performed using an imaging device. The imaging device may include a positron emission tomography (PET) device. The amyloid plaque measurement may be performed on a biopsy.

[0229] The amyloid plaque measurement may be performed using a spinal tap (for example, when the amyloid plaque measurement includes a cerebrospinal fluid (CSF) amyloid plaque measurement). In some embodiments, the amyloid plaque measurement is obtained by an assay such as an immunoassay. The beta amyloid plaque measurement may be indicative of a treatment effect of the oligonucleotide on a neurodegenerative disease such as Alzheimer's disease.

[0230] In some embodiments, the composition reduces the amyloid plaque measurement relative to the baseline amyloid plaque measurement. In some embodiments, the reduction is measured in a second sample obtained from the subject after administering the composition to the subject. In some embodiments, the reduction is measured directly in the subject after administering the composition to the subject. In some embodiments, the amyloid plaque measurement is decreased by about 2.5% or more, about 5% or more, or about 7.5% or more, relative to the baseline amyloid plaque measurement. In some embodiments, the amyloid plaque measurement is decreased by about 10% or more, relative to the baseline amyloid plaque measurement. In some embodiments, the amyloid plaque measurement is decreased by about 20% or more, about 30% or more, about 40% or more, about 50% or more, about 60⁰% or more, about 70% or more, about 80% or more, about 90% or more, relative to the baseline amyloid plaque measurement. In some embodiments, the amyloid plaque measurement is decreased by no more than about 2.5%, no more than about 5%, or no more than about 7.5%, relative to the baseline amyloid plaque measurement. In some embodiments, the amyloid plaque measurement is decreased by no more than about 10%, relative to the baseline amyloid plaque measurement. In some embodiments, the amyloid plaque measurement is decreased by no more than about 20%, no more than about 30%, no more than about 40%, no more than about 50%, no more than about 60%, no more than about 70%, no more than about 80%, no more than about 90%, or no more than about 100% relative to the baseline amyloid plaque measurement. In some embodiments, the amyloid plaque measurement is decreased by 2.5%, 5%, 7.5%, 10%, 20%, 30%, 40%, 50%, 60%, 70%, 80%, 90%, or 100%, or by a range defined by any of the two aforementioned percentages.

[0231] In some embodiments, the measurement is a beta-amyloid 42 measurement. The beta-amyloid 42 measurement may include a cerebrospinal fluid (CSF) beta-amyloid 42 measurement. In some embodiments, the beta-amyloid 42 measurement includes a concentration or amount. The beta-amyloid 42 measurement may be performed on a biopsy. The beta-amyloid 42 measurement may be performed using a spinal tap (for example, when the beta-amyloid 42 measurement includes a CSF beta-amyloid 42 measurement). In some embodiments, the beta-amyloid 42 measurement is obtained by an assay such as an immunoassay. The beta-amyloid 42 measurement may be indicative of a treatment effect of the oligonucleotide on a neurodegenerative disease such as Alzheimer's disease.

[0232] In some embodiments, the composition reduces the CSF beta-amyloid 42 measurement relative to the baseline beta-amyloid 42 measurement. In some embodiments, the reduction is measured in a second sample (for example, a CSF sample) obtained from the subject after administering the composition to the subject. In some embodiments, the CSF beta-amyloid 42 measurement is decreased by about 2.5% or more, about 5% or more, or about 7.5% or more, relative to the baseline CSF beta-amyloid 42 measurement. In some embodiments, the CSF beta-amyloid 42 measurement is decreased by about 10% or more, relative to the baseline CSF beta-amyloid 42 measurement. In some embodiments, the CSF beta-amyloid 42 measurement is decreased by about 20% or more, about 30% or more, about 40% or more, about 50% or more, about 60% or more, about 70% or more, about 80% or more, about 90% or more, relative to the baseline CSF beta-amyloid 42 measurement. In some embodiments, the CSF beta-amyloid 42 measurement is decreased by no more than about 2.5%, no more than about 5%, or no more than about 7.5%, relative to the baseline CSF beta-amyloid 42 measurement. In some embodiments, the CSF beta-amyloid 42 measurement is decreased by no more than about 10%, relative to the baseline CSF beta-amyloid 42 measurement. In some embodiments, the CSF beta-amyloid 42 measurement is decreased by no more than about 20%, no more than about 30%, no more than about 40%, no more than about 50%, no more than about 60%, no more than about 70%, no more than about 80%, no more than about 90%, or no more than about 100% relative to the baseline CSF beta-amyloid 42 measurement. In some embodiments, the CSF beta-amyloid 42 measurement is decreased by 2.5%, 5%, 7.5%, 10%, 20%, 30%, 40%, 50%, 60%, 70%, 80%, 90%, or 100%, or by a range defined by any of the two aforementioned percentages.

[0233] In some embodiments, the measurement is a tau measurement. In some embodiments, the tau measurement includes a concentration or amount. The tau measurement may be performed on a biopsy. In some embodiments, the tau measurement is obtained by an assay such as an immunoassay. The beta tau measurement may be indicative of a treatment effect of the oligonucleotide on a neurodegenerative disease such as Alzheimer's disease or Parkinson's disease.

[0234] In some embodiments, the tau measurement is a central nervous system (CNS) tau measurement. The tau measurement may include a total tau measurement. The tau measurement may include a unphosphorylated tau measurement. The tau measurement may include a phosphorylated tau (phospho-tau) measurement. In some embodiments, the tau measurement is a tau accumulation measurement. In some embodiments, the tau measurement is a CNS tau accumulation measurement. The CNS tau accumulation measurement may be indicative of a treatment effect of the oligonucleotide on a neurodegenerative disease such as Alzheimer's disease or Parkinson's disease.

[0235] In some embodiments, the composition reduces the CNS tau accumulation measurement relative to the baseline CNS tau accumulation measurement. In some embodiments, the reduction is measured in a second sample obtained from the subject after administering the composition to the subject. In some embodiments, the CNS tau accumulation measurement is decreased by about 2.5% or more, about 5% or more, or about 7.5% or more, relative to the baseline CNS tau accumulation measurement. In some embodiments, the CNS tau accumulation measurement is decreased by about 10% or more, relative to the baseline CNS tau accumulation measurement. In some embodiments, the CNS tau accumulation measurement is decreased by about 20% or more, about 30% or more, about 40% or more, about 50% or more, about 60% or more, about 70% or more, about 80% or more, about 90% or more, relative to the baseline CNS tau accumulation measurement. In some embodiments, the CNS tau accumulation measurement is decreased by no more than about 2.5%, no more than about 5%, or no more than about 7.5%, relative to the baseline CNS tau accumulation measurement. In some embodiments, the CNS tau accumulation measurement is decreased by no more than about 10%, relative to the baseline CNS tau accumulation measurement. In some embodiments, the CNS tau accumulation measurement is decreased by no more than about 20%, no more than about 30%, no more than about 40%, no more than about 50%, no more than about 60%, no more than about 70%, no more than about 80%, no more than about 90%, or no more than about 100% relative to the baseline CNS tau accumulation measurement. In some embodiments, the CNS tau accumulation measurement is decreased by 2.5%, 5%, 7.5%, 10%, 20%, 30%, 40%, 50%, 60%, 70%, 80%, 90%, or 100%, or by a range defined by any of the two aforementioned percentages.

[0236] The tau measurement may include a cerebrospinal fluid (CSF) tau measurement. The CSF tau measurement may be performed after use of a spinal tap. The CSF tau measurement may be indicative of a treatment effect of the oligonucleotide on a neurodegenerative disease such as Alzheimer's disease or Parkinson's disease.

[0237] In some embodiments, the composition reduces the CSF tau measurement relative to the baseline CSF tau measurement. In some embodiments, the reduction is measured in a second sample obtained from the subject after administering the composition to the subject. In some embodiments, the reduction is measured in a second CSF sample obtained from the subject after administering the composition to the subject. In some embodiments, the CSF tau measurement is decreased by about 2.5% or more, about 5% or more, or about 7.5% or more, relative to the baseline CSF tau measurement. In some embodiments, the CSF tau measurement is decreased by about 10% or more, relative to the baseline CSF tau measurement. In some embodiments, the CSF tau measurement is decreased by about 20% or more, about 30% or more, about 40% or more, about 50% or more, about 60% or more, about 70% or more, about 80% or more, about 90% or more, relative to the baseline CSF tau measurement. In some embodiments, the CSF tau measurement is decreased by no more than about 2.5%, no more than about 5%, or no more than about 7.5%, relative to the baseline CSF tau measurement. In some embodiments, the CSF tau measurement is decreased by no more than about 10%, relative to the baseline CSF tau measurement. In some embodiments, the CSF tau measurement is decreased by no more than about 20%, no more than about 30%, no more than about 40%, no more than about 50%, no more than about 60%, no more than about 70%, no more than about 80%, no more than about 90%, or no more than about 100% relative to the baseline CSF tau measurement. In some embodiments, the CSF tau measurement is decreased by 2.5%, 5%, 7.5%, 10%, 20%, 30%, 40%, 50%, 60%, 70%, 80%, 90%, or 100%, or by a range defined by any of the two aforementioned percentages.

[0238] The CSF tau measurement may include a CSF phospho-tau measurement. The CSF phospho-tau measurement may include an amount of phospho-tau in relation to total tau or unphosphorylated tau. For example, the CSF phospho-tau measurement may include a phospho-tau/tau ratio. The CSF phospho-tau measurement may be indicative of a treatment effect of the oligonucleotide on a neurodegenerative disease such as Alzheimer's disease or Parkinson's disease.

[0239] In some embodiments, the composition reduces the CSF phospho-tau measurement relative to the baseline CSF phospho-tau measurement. In some embodiments, the reduction is measured in a second sample obtained from the subject after administering the composition to the subject. In some embodiments, the reduction is measured in a second CSF sample obtained from the subject after administering the composition to the subject. In some embodiments, the CSF phospho-tau measurement is decreased by about 2.5% or more, about 5% or more, or about 7.5% or more, relative to the baseline CSF phospho-tau measurement. In some embodiments, the CSF phospho-tau measurement is decreased by about 10% or more, relative to the baseline CSF phospho-tau measurement. In some embodiments, the CSF phospho-tau measurement is decreased by about 20% or more, about 30% or more, about 40% or more, about 50% or more, about 60% or more, about 70% or more, about 80% or more, about 90% or more, relative to the baseline CSF phospho-tau measurement. In some embodiments, the CSF phospho-tau measurement is decreased by no more than about 2.5%, no more than about 5%, or no more than about 7.5%, relative to the baseline CSF phospho-tau measurement. In some embodiments, the CSF phospho-tau measurement is decreased by no more than about 10%, relative to the baseline CSF phospho-tau measurement. In some embodiments, the CSF phospho-tau measurement is decreased by no more than about 20%, no more than about 30%, no more than about 40%, no more than about 50%, no more than about 60%, no more than about 70%, no more than about 80%, no more than about 90%, or no more than about 100% relative to the baseline CSF phospho-tau measurement. In some embodiments, the CSF phospho-tau measurement is decreased by 2.5%, 5%, 7.5%, 10%, 20%, 30%, 40%, 50⁰%, 60%, 70%, 80%, 90%, or 100%, or by a range defined by any of the two aforementioned percentages.

[0240] In some embodiments, the neurofilament light chain (NfL) measurement includes a CSF or plasma NfL measurement. The NfL measurement may be a CSF NfL measurement. The NfL measurement may be a plasma NfL measurement. The NfL measurement may include a concentration or an amount. The NfL measurement may be indicative of a neurodegenerative disease such as Alzheimer's disease or Parkinson's disease.

[0241] In some embodiments, the composition reduces the NfL measurement relative to the baseline NfL measurement. In some embodiments, the reduction is measured in a second sample obtained from the subject after administering the composition to the subject. In some embodiments, the NfL measurement is decreased by about 2.5% or more, about 5% or more, or about 7.5% or more, relative to the baseline NfL measurement. In some embodiments, the NfL measurement is decreased by about 10% or more, relative to the baseline NfL measurement. In some embodiments, the NfL measurement is decreased by about 20% or more, about 30% or more, about 40% or more, about 50% or more, about 60% or more, about 70% or more, about 80% or more, about 90% or more, relative to the baseline NfL measurement. In some embodiments, the NfL measurement is decreased by no more than about 2.5%, no more than about 5%, or no more than about 7.5%, relative to the baseline NfL measurement. In some embodiments, the NfL measurement is decreased by no more than about 10%, relative to the baseline NfL measurement. In some embodiments, the NfL measurement is decreased by no more than about 20%, no more than about 30%, no more than about 40%, no more than about 50%, no more than about 60%, no more than about 70%, no more than about 80%, no more than about 90%, or no more than about 100% relative to the baseline NfL measurement. In some embodiments, the NfL measurement is decreased by 2.5%, 5%, 7.5%, 10%, 20%, 30%, 40%, 50%, 60%, 70%, 80%, 90%, or 100%, or by a range defined by any of the two aforementioned percentages.

[0242] In some embodiments, the measurement is a alpha-synuclein measurement. The alpha-synuclein measurement may include a cerebrospinal fluid (CSF) alpha-synuclein measurement. In some embodiments, the alpha-synuclein measurement includes a concentration or amount. The alpha-synuclein measurement may be performed on a biopsy. The alpha-synuclein measurement may be performed using a spinal tap (for example, when the alpha-synuclein measurement includes a CSF alpha-synuclein measurement). In some embodiments, the alpha-synuclein measurement is obtained by an assay such as an immunoassay. The alpha-synuclein measurement may be indicative of a treatment effect of the oligonucleotide on a neurodegenerative disease such as Parkinson's disease. The alpha-synuclein measurement may be indicative of a treatment effect of the oligonucleotide on dementia.

[0243] In some embodiments, the composition reduces the alpha-synuclein measurement relative to the baseline alpha-synuclein measurement. In some embodiments, the reduction is measured in a second sample obtained from the subject after administering the composition to the subject. In some embodiments, the alpha-synuclein measurement is decreased by about 2.5% or more, about 5% or more, or about 7.5% or more, relative to the baseline alpha-synuclein measurement. In some embodiments, the alpha-synuclein measurement is decreased by about 10% or more, relative to the baseline alpha-synuclein measurement. In some embodiments, the alpha-synuclein measurement is decreased by about 20% or more, about 30% or more, about 40% or more, about 50% or more, about 60% or more, about 70% or more, about 80% or more, about 90% or more, relative to the baseline alpha-synuclein measurement. In some embodiments, the alpha-synuclein measurement is decreased by no more than about 2.5%, no more than about 5%, or no more than about 7.5%, relative to the baseline alpha-synuclein measurement. In some embodiments, the alpha-synuclein measurement is decreased by no more than about 10%, relative to the baseline alpha-synuclein measurement. In some embodiments, the alpha-synuclein measurement is decreased by no more than about 20%, no more than about 30%, no more than about 40%, no more than about 50%, no more than about 60%, no more than about 70%, no more than about 80%, no more than about 90%, or no more than about 100% relative to the baseline alpha-synuclein measurement. In some embodiments, the alpha-synuclein measurement is decreased by 2.5%, 5%, 7.5%, 10%, 20%, 30%, 40%, 50%, 60%, 70%, 80%, 90%, or 100%, or by a range defined by any of the two aforementioned percentages.

[0244] In some embodiments, the measurement is a Lewy body measurement. The Lewy body measurement may include a central nervous system (CNS) Lewy body measurement. In some embodiments, the Lewy body measurement includes a concentration or amount. The Lewy body measurement may be performed using an imaging device. The imaging device may include a positron emission tomography (PET) device. The beta Lewy body measurement may be indicative of a treatment effect of the oligonucleotide on dementia.

[0245] In some embodiments, the composition reduces the Lewy body measurement relative to the baseline Lewy body measurement. In some embodiments, the reduction is measured in a second sample obtained from the subject after administering the composition to the subject. In some embodiments, the reduction is measured directly in the subject after administering the composition to the subject. In some embodiments, the Lewy body measurement is decreased by about 2.5% or more, about 5% or more, or about 7.5% or more, relative to the baseline Lewy body measurement. In some embodiments, the Lewy body measurement is decreased by about 10% or more, relative to the baseline Lewy body measurement. In some embodiments, the Lewy body measurement is decreased by about 20% or more, about 30% or more, about 40% or more, about 50% or more, about 60% or more, about 70% or more, about 80% or more, about 90% or more, relative to the baseline Lewy body measurement. In some embodiments, the Lewy body measurement is decreased by no more than about 2.5%, no more than about 5%, or no more than about 7.5%, relative to the baseline Lewy body measurement. In some embodiments, the Lewy body measurement is decreased by no more than about 10%, relative to the baseline Lewy body measurement. In some embodiments, the Lewy body measurement is decreased by no more than about 20%, no more than about 30%, no more than about 40%, no more than about 50%, no more than about 60%, no more than about 70%, no more than about 80%, no more than about 90%, or no more than about 100% relative to the baseline Lewy body measurement. In some embodiments, the Lewy body measurement is decreased by 2.5%, 5%, 7.5%, 10%, 20%, 30%, 40%, 50%, 60%, 70%, 80%, 90%, or 100%, or by a range defined by any of the two aforementioned percentages.

[0246] In some embodiments, the measurement is an MTRES1 protein measurement. In some embodiments, the MTRES1 protein measurement comprises an MTRES1 protein level. In some embodiments, the MTRES1 protein level is indicated as a mass or percentage of MTRES1 protein per sample weight. In some embodiments, the MTRES1 protein level is indicated as a mass or percentage of MTRES1 protein per sample volume. In some embodiments, the MTRES1 protein level is indicated as a mass or percentage of MTRES1 protein per total protein within the sample. In some embodiments, the MTRES1 protein measurement is a CNS tissue or fluid MTRES1 protein measurement. In some embodiments, the MTRES1 protein measurement is obtained by an assay such as an immunoassay, a colorimetric assay, or a fluorescence assay.

[0247] In some embodiments, the composition reduces the MTRES1 protein measurement relative to the baseline MTRES1 protein measurement. In some embodiments, the composition reduces CNS tissue or fluid MTRES1 protein levels relative to the baseline MTRES1 protein measurement. In some embodiments, the reduced MTRES1 protein levels are measured in a second sample obtained from the subject after administering the composition to the subject. In some embodiments, the MTRES1 protein measurement is decreased by about 2.5% or more, about 5% or more, or about 7.5% or more, relative to the baseline MTRES1 protein measurement. In some embodiments, the MTRES1 protein measurement is decreased by about 10% or more, relative to the baseline MTRES1 protein measurement. In some embodiments, the MTRES1 protein measurement is decreased by about 20% or more, about 30% or more, about 40% or more, about 50% or more, about 60% or more, about 70% or more, about 80% or more, about 90% or more, or about 100%, relative to the baseline MTRES1 protein measurement. In some embodiments, the MTRES1 protein measurement is decreased by no more than about 2.5%, no more than about 5%, or no more than about 7.5%, relative to the baseline MTRES1 protein measurement. In some embodiments, the MTRES1 protein measurement is decreased by no more than about 10%, relative to the baseline MTRES1 protein measurement. In some embodiments, the MTRES1 protein measurement is decreased by no more than about 20%, no more than about 30%, no more than about 40%, no more than about 50%, no more than about 60%, no more than about 70%, no more than about 80%, no more than about 90%, or no more than about 100% relative to the baseline MTRES1 protein measurement. In some embodiments, the MTRES1 protein measurement is decreased by 2.5%, 5%, 7.5%, 19%, 20%, 30%, 40%, 50%, 60%, 70%, 80%, 90%, or 100%, or by a range defined by any of the two aforementioned percentages.

[0248] In some embodiments, the measurement is an MTRES1 mRNA measurement. In some embodiments, the MTRES1 mRNA measurement comprises an MTRES1 mRNA level. In some embodiments, the MTRES1 mRNA level is indicated as an amount or percentage of MTRES1 mRNA per sample weight. In some embodiments, the MTRES1 mRNA level is indicated as an amount or percentage of MTRES1 mRNA per sample volume. In some embodiments, the MTRES1 mRNA level is indicated as an amount or percentage of MTRES1 mRNA per total mRNA within the sample. In some embodiments, the MTRES1 mRNA level is indicated as an amount or percentage of MTRES1 mRNA per total nucleic acids within the sample. In some embodiments, the MTRES1 mRNA level is indicated relative to another mRNA level, such as an mRNA level of a housekeeping gene, within the sample. In some embodiments, the MTRES1 mRNA measurement is a CNS tissue or fluid MTRES1 mRNA measurement. In some embodiments, the MTRES1 mRNA measurement is obtained by an assay such as a PCR assay. In some embodiments, the PCR comprises qPCR. In some embodiments, the PCR comprises reverse transcription of the MTRES1 mRNA.

[0249] In some embodiments, the composition reduces the MTRES1 mRNA measurement relative to the baseline MTRES1 mRNA measurement. In some embodiments, the MTRES1 mRNA measurement is obtained in a second sample obtained from the subject after administering the composition to the subject. In some embodiments, the composition reduces MTRES1 mRNA levels relative to the baseline MTRES1 mRNA levels. In some embodiments, the reduced MTRES1 mRNA levels are measured in a second sample obtained from the subject after administering the composition to the subject. In some embodiments, the second sample is a CNS sample. In some embodiments, the MTRES1 mRNA measurement is reduced by about 2.5% or more, about 5% or more, or about 7.5% or more, relative to the baseline MTRES1 mRNA measurement. In some embodiments, the MTRES1 mRNA measurement is decreased by about 10% or more, relative to the baseline MTRES1 mRNA measurement. In some embodiments, the MTRES1 mRNA measurement is decreased by about 20% or more, about 30% or more, about 40% or more, about 50% or more, about 60% or more, about 70% or more, about 80% or more, about 90% or more, or about 100%, relative to the baseline MTRES1 mRNA measurement. In some embodiments, the MTRES1 mRNA measurement is decreased by no more than about 2.5%, no more than about 5%, or no more than about 7.5%, relative to the baseline MTRES1 mRNA measurement. In some embodiments, the MTRES1 mRNA measurement is decreased by no more than about 10%, relative to the baseline MTRES1 mRNA measurement. In some embodiments, the MTRES1 mRNA measurement is decreased by no more than about 20%, no more than about 30%, no more than about 40%, no more than about 50%, no more than about 60%, no more than about 70%, no more than about 80%, no more than about 90%, or no more than about 100%, relative to the baseline MTRES1 mRNA measurement. In some embodiments, the MTRES1 mRNA measurement is decreased by 2.5%, 5%, 7.5%, 10%, 20%, 30%, 40%, 50%, 60%, 70%, 80%, 90%, or 100% or by a range defined by any of the two aforementioned percentages.

### III. DEFINITIONS

[0250] Unless defined otherwise, all terms of art, notations and other technical and scientific terms or terminology used herein are intended to have the same meaning as is commonly understood by one of ordinary skill in the art to which the claimed subject matter pertains. In some cases, terms with commonly understood meanings are defined herein for clarity and/or for ready reference, and the inclusion of such definitions herein should not necessarily be construed to represent a substantial difference over what is generally understood in the art.

[0251] Throughout this application, various embodiments may be presented in a range format. It should be understood that the description in range format is merely for convenience and brevity and should not be construed as an inflexible limitation on the scope of the disclosure. Accordingly, the description of a range should be considered to have specifically disclosed all the possible subranges as well as individual numerical values within that range. For example, description of a range such as from 1 to 6 should be considered to have specifically disclosed subranges such as from 1 to 3, from 1 to 4, from 1 to 5, from 2 to 4, from 2 to 6, from 3 to 6 etc., as well as individual numbers within that range, for example, 1, 2, 3, 4, 5, and 6. This applies regardless of the breadth of the range.

[0252] As used in the specification and claims, the singular forms “a”, “an” and “the” include plural references unless the context clearly dictates otherwise. For example, the term “a sample” includes a plurality of samples, including mixtures thereof.

[0253] The terms “determining,” “measuring,” “evaluating,” “assessing,” “assaying,” and “analyzing” are often used interchangeably herein to refer to forms of measurement. The terms include determining if an element is present or not (for example, detection). These terms can include quantitative, qualitative or quantitative and qualitative determinations. Assessing can be relative or absolute. “Detecting the presence of” can include determining the amount of something present in addition to determining whether it is present or absent depending on the context.

[0254] The terms “subject,” and “patient” may be used interchangeably herein. A “subject” can be a biological entity containing expressed genetic materials. The biological entity can be a plant, animal, or microorganism, including, for example, bacteria, viruses, fungi, and protozoa. The subject can be a mammal. The mammal can be a human. The subject may be diagnosed or suspected of being at high risk for a disease. In some cases, the subject is not necessarily diagnosed or suspected of being at high risk for the disease.

[0255] As used herein, the term “about” a number refers to that number plus or minus 10% of that number. The term “about” a range refers to that range minus 10% of its lowest value and plus 10% of its greatest value.

[0256] As used herein, the terms “treatment” or “treating” are used in reference to a pharmaceutical or other intervention regimen for obtaining beneficial or desired results in the recipient. Beneficial or desired results include but are not limited to a therapeutic benefit and/or a prophylactic benefit. A therapeutic benefit may refer to eradication or amelioration of symptoms or of an underlying disorder being treated. Also, a therapeutic benefit can be achieved with the eradication or amelioration of one or more of the physiological symptoms associated with the underlying disorder such that an improvement is observed in the subject, notwithstanding that the subject may still be afflicted with the underlying disorder. A prophylactic effect includes delaying, preventing, or eliminating the appearance of a disease or condition, delaying or eliminating the onset of symptoms of a disease or condition, slowing, halting, or reversing the progression of a disease or condition, or any combination thereof. For prophylactic benefit, a subject at risk of developing a particular disease, or to a subject reporting one or more of the physiological symptoms of a disease may undergo treatment, even though a diagnosis of this disease may not have been made.

[0257] The term “Cx-y” or “Cx-Cy” when used in conjunction with a chemical moiety, such as alkyl, alkenyl, or alkynyl is meant to include groups that contain from x to y carbons in the chain. For example, the term “C1-6alkyl” refers to substituted or unsubstituted saturated hydrocarbon groups, including straight-chain alkyl and branched-chain alkyl groups that contain from 1 to 6 carbons.

[0258] The terms “Cx-yalkenyl” and “Cx-yalkynyl” refer to substituted or unsubstituted unsaturated aliphatic groups analogous in length and possible substitution to the alkyls described above, but that contain at least one double or triple bond, respectively.

[0259] The term “carbocycle” as used herein refers to a saturated, unsaturated or aromatic ring in which each atom of the ring is carbon. Carbocycle includes 3- to 10-membered monocyclic rings, 5- to 12-membered bicyclic rings, 5- to 12-membered spiro bicycles, and 5- to 12-membered bridged rings. Each ring of a bicyclic carbocycle may be selected from saturated, unsaturated, and aromatic rings. In an exemplary embodiment, an aromatic ring, e.g., phenyl, may be fused to a saturated or unsaturated ring, e.g., cyclohexane, cyclopentane, or cyclohexene. A bicyclic carbocycle includes any combination of saturated, unsaturated and aromatic bicyclic rings, as valence permits. A bicyclic carbocycle further includes spiro bicyclic rings such as spiropentane. A bicyclic carbocycle includes any combination of ring sizes such as 3-3 spiro ring systems, 4-4 spiro ring systems, 4-5 fused ring systems, 5-5 fused ring systems, 5-6 fused ring systems, 6-6 fused ring systems, 5-7 fused ring systems, 6-7 fused ring systems, 5-8 fused ring systems, and 6-8 fused ring systems. Exemplary carbocycles include cyclopentyl, cyclohexyl, cyclohexenyl, adamantyl, phenyl, indanyl, naphthyl, and bicyclo[1.1.1]pentanyl.

[0260] The term “aryl” refers to an aromatic monocyclic or aromatic multicyclic hydrocarbon ring system. The aromatic monocyclic or aromatic multicyclic hydrocarbon ring system contains only hydrogen and carbon and from five to eighteen carbon atoms, where at least one of the rings in the ring system is aromatic, i.e., it contains a cyclic, delocalized (4n+2) π-electron system in accordance with the Hückel theory. The ring system from which aryl groups are derived include, but are not limited to, groups such as benzene, fluorene, indane, indene, tetralin and naphthalene.

[0261] The term “cycloalkyl” refers to a saturated ring in which each atom of the ring is carbon. Cycloalkyl may include monocyclic and polycyclic rings such as 3- to 10-membered monocyclic rings, 5-to 12-membered bicyclic rings, 5- to 12-membered spiro bicycles, and 5- to 12-membered bridged rings. In certain embodiments, a cycloalkyl comprises three to ten carbon atoms. In other embodiments, a cycloalkyl comprises five to seven carbon atoms. The cycloalkyl may be attached to the rest of the molecule by a single bond. Examples of monocyclic cycloalkyls include, e.g., cyclopropyl, cyclobutyl, cyclopentyl, cyclohexyl, cycloheptyl, and cyclooctyl. Polycyclic cycloalkyl radicals include, for example, adamantyl, spiropentane, norbornyl (i.e., bicyclo[2.2.1]heptanyl), decalinyl, 7,7 dimethyl bicyclo[2.2.1]heptanyl, bicyclo[1.1.1]pentanyl, and the like.

[0262] The term “cycloalkenyl” refers to a saturated ring in which each atom of the ring is carbon and there is at least one double bond between two ring carbons. Cycloalkenyl may include monocyclic and polycyclic rings such as 3- to 10-membered monocyclic rings, 6- to 12-membered bicyclic rings, and 5- to 12-membered bridged rings. In other embodiments, a cycloalkenyl comprises five to seven carbon atoms. The cycloalkenyl may be attached to the rest of the molecule by a single bond. Examples of monocyclic cycloalkenyls include, e.g., cyclopentenyl, cyclohexenyl, cycloheptenyl, and cyclooctenyl.

[0263] The term “halo” or, alternatively, “halogen” or “halide,” means fluoro, chloro, bromo or iodo. In some embodiments, halo is fluoro, chloro, or bromo.

[0264] The term “haloalkyl” refers to an alkyl radical, as defined above, that is substituted by one or more halo radicals, for example, trifluoromethyl, dichloromethyl, bromomethyl, 2,2,2 trifluoroethyl, 1 chloromethyl 2 fluoroethyl, and the like. In some embodiments, the alkyl part of the haloalkyl radical is optionally further substituted as described herein.

[0265] The term “heterocycle” as used herein refers to a saturated, unsaturated or aromatic ring comprising one or more heteroatoms. Exemplary heteroatoms include N, O, Si, P, B, and S atoms. Heterocycles include 3- to 10-membered monocyclic rings, 6- to 12-membered bicyclic rings, 5- to 12-membered spiro bicycles, and 5- to 12-membered bridged rings. A bicyclic heterocycle includes any combination of saturated, unsaturated and aromatic bicyclic rings, as valence permits. In an exemplary embodiment, an aromatic ring, e.g., pyridyl, may be fused to a saturated or unsaturated ring, e.g., cyclohexane, cyclopentane, morpholine, piperidine or cyclohexene. A bicyclic heterocycle includes any combination of ring sizes such as 4-5 fused ring systems, 5-5 fused ring systems, 5-6 fused ring systems, 6-6 fused ring systems, 5-7 fused ring systems, 6-7 fused ring systems, 5-8 fused ring systems, and 6-8 fused ring systems. A bicyclic heterocycle further includes spiro bicyclic rings, e.g., 5 to 12-membered spiro bicycles, such as 2-oxa-6-azaspiro[3.3]heptane.

[0266] The term “heteroaryl” refers to a radical derived from a 5 to 18 membered aromatic ring radical that comprises two to seventeen carbon atoms and from one to six heteroatoms selected from nitrogen, oxygen and sulfur. As used herein, the heteroaryl radical is a monocyclic, bicyclic, tricyclic or tetracyclic ring system, wherein at least one of the rings in the ring system is aromatic, i.e., it contains a cyclic, delocalized (4n+2) π-electron system in accordance with the Hückel theory. Heteroaryl includes fused or bridged ring systems. The heteroatom(s) in the heteroaryl radical is optionally oxidized. One or more nitrogen atoms, if present, are optionally quaternized. The heteroaryl is attached to the rest of the molecule through any atom of the ring(s). Examples of heteroaryls include, but are not limited to, azepinyl, acridinyl, benzimidazolyl, benzindolyl, 1,3 benzodioxolyl, benzofuranyl, benzoxazolyl, benzo[d]thiazolyl, benzothiadiazolyl, benzo[b][1,4]dioxepinyl, benzo[b][1,4]oxazinyl, 1,4 benzodioxanyl, benzonaphthofuranyl, benzoxazolyl, benzodioxolyl, benzodioxinyl, benzopyranyl, benzopyranonyl, benzofuranyl, benzofuranonyl, benzothienyl (benzothiophenyl), benzothieno[3,2 d]pyrimidinyl, benzotriazolyl, benzo[4,6]imidazo[1,2 a]pyridinyl, carbazolyl, cinnolinyl, cyclopenta[d]pyrimidinyl, 6,7 dihydro 5H cyclopenta[4,5]thieno[2,3 d]pyrimidinyl, 5,6 dihydrobenzo[h]quinazolinyl, 5,6 dihydrobenzo[h]cinnolinyl, 6,7-dihydro-5H-benzo[6,7]cyclohepta[1,2-c]pyridazinyl, dibenzofuranyl, dibenzothiophenyl, furanyl, furanonyl, furo[3,2 c]pyridinyl, 5,6,7,8,9,10 hexahydrocycloocta[d]pyrimidinyl, 5,6,7,8,9,10 hexahydrocycloocta[d]pyridazinyl, 5,6,7,8,9,10 hexahydrocycloocta[d]pyridinyl, isothiazolyl, imidazolyl, indazolyl, indolyl, indazolyl, isoindolyl, indolinyl, isoindolinyl, isoquinolyl, indolizinyl, isoxazolyl, 5,8 methano 5,6,7,8 tetrahydroquinazolinyl, naphthyridinyl, 1,6 naphthyridinonyl, oxadiazolyl, 2 oxoazepinyl, oxazolyl, oxiranyl, 5,6,6a,7,8,9,10,10a octahydrobenzo[h]quinazolinyl, 1 phenyl 1H pyrrolyl, phenazinyl, phenothiazinyl, phenoxazinyl, phthalazinyl, pteridinyl, purinyl, pyrrolyl, pyrazolyl, pyrazolo[3,4 d]pyrimidinyl, pyridinyl, pyrido[3,2 d]pyrimidinyl, pyrido[3,4 d]pyrimidinyl, pyrazinyl, pyrimidinyl, pyridazinyl, pyrrolyl, quinazolinyl, quinoxalinyl, quinolinyl, isoquinolinyl, tetrahydroquinolinyl, 5,6,7,8 tetrahydroquinazolinyl, 5,6,7,8 tetrahydrobenzo[4,5]thieno[2,3 d]pyrimidinyl, 6,7,8,9 tetrahydro 5H cyclohepta[4,5]thieno[2,3 d]pyrimidinyl, 5,6,7,8 tetrahydropyrido[4,5 c]pyridazinyl, thiazolyl, thiadiazolyl, triazolyl, tetrazolyl, triazinyl, thieno[2,3 d]pyrimidinyl, thieno[3,2 d]pyrimidinyl, thieno[2,3 c]pyridinyl, and thiophenyl (i.e. thienyl).

[0267] The term “heterocycloalkyl” refers to a saturated ring with carbon atoms and at least one heteroatom. Exemplary heteroatoms include N, O, Si, P, B, and S atoms. Heterocycloalkyl may include monocyclic and polycyclic rings such as 3- to 10-membered monocyclic rings, 6- to 12-membered bicyclic rings, 5- to 12-membered spiro bicycles, and 5- to 12-membered bridged rings. The heteroatoms in the heterocycloalkyl radical are optionally oxidized. One or more nitrogen atoms, if present, are optionally quaternized. The heterocycloalkyl is attached to the rest of the molecule through any atom of the heterocycloalkyl, valence permitting, such as any carbon or nitrogen atoms of the heterocycloalkyl. Examples of heterocycloalkyl radicals include, but are not limited to, dioxolanyl, thienyl[1,3]dithianyl, decahydroisoquinolyl, imidazolinyl, imidazolidinyl, isothiazolidinyl, isoxazolidinyl, morpholinyl, octahydroindolyl, octahydroisoindolyl, 2 oxopiperazinyl, 2 oxopiperidinyl, 2 oxopyrrolidinyl, oxazolidinyl, piperidinyl, piperazinyl, 4 piperidonyl, pyrrolidinyl, pyrazolidinyl, quinuclidinyl, thiazolidinyl, tetrahydrofuryl, trithianyl, tetrahydropyranyl, thiomorpholinyl, thiamorpholinyl, 1 oxo thiomorpholinyl, 2-oxa-6-azaspiro[3.3]heptane, and 1,1 dioxo thiomorpholinyl.

[0268] The term “heterocycloalkenyl” refers to an unsaturated ring with carbon atoms and at least one heteroatom and there is at least one double bond between two ring carbons. Heterocycloalkenyl does not include heteroaryl rings. Exemplary heteroatoms include N, O, Si, P, B, and S atoms. Heterocycloalkenyl may include monocyclic and polycyclic rings such as 3- to 10-membered monocyclic rings, 6- to 12-membered bicyclic rings, and 5- to 12-membered bridged rings. In other embodiments, a heterocycloalkenyl comprises five to seven ring atoms. The heterocycloalkenyl may be attached to the rest of the molecule by a single bond. Examples of monocyclic cycloalkenyls include, e.g., pyrroline (dihydropyrrole), pyrazoline (dihydropyrazole), imidazoline (dihydroimidazole), triazoline (dihydrotriazole), dihydrofuran, dihydrothiophene, oxazoline (dihydrooxazole), isoxazoline (dihydroisoxazole), thiazoline (dihydrothiazole), isothiazoline (dihydroisothiazole), oxadiazoline (dihydrooxadiazole), thiadiazoline (dihydrothiadiazole), dihydropyridine, tetrahydropyridine, dihydropyridazine, tetrahydropyridazine, dihydropyrimidine, tetrahydropyrimidine, dihydropyrazine, tetrahydropyrazine, pyran, dihydropyran, thiopyran, dihydrothiopyran, dioxine, dihydrodioxine, oxazine, dihydrooxazine, thiazine, and dihydrothiazine.

[0269] The term “substituted” refers to moieties having substituents replacing a hydrogen on one or more carbons or substitutable heteroatoms, e.g., an NH or NH2 of a compound. It will be understood that “substitution” or “substituted with” includes the implicit proviso that such substitution is in accordance with permitted valence of the substituted atom and the substituent, and that the substitution results in a stable compound, i.e., a compound which does not spontaneously undergo transformation such as by rearrangement, cyclization, elimination, etc. In certain embodiments, substituted refers to moieties having substituents replacing two hydrogen atoms on the same carbon atom, such as substituting the two hydrogen atoms on a single carbon with an oxo, imino or thioxo group. As used herein, the term “substituted” is contemplated to include all permissible substituents of organic compounds. In a broad aspect, the permissible substituents include acyclic and cyclic, branched and unbranched, carbocyclic and heterocyclic, aromatic and non-aromatic substituents of organic compounds. The permissible substituents can be one or more and the same or different for appropriate organic compounds.

[0270] In some embodiments, substituents may include any substituents described herein, for example: halogen, hydroxy, oxo (═O), thioxo (═S), cyano (—CN), nitro (—NO2), imino (═N—H), oximo (═N—OH), hydrazino (═N—NH2), —Rb ORa, —Rb OC(O) Ra, —Rb OC(O) ORa, —Rb OC(O)N(Ra)2, —Rb N(Ra)2, —Rb C(O)Ra, —Rb C(O)ORa, —Rb C(O)N(Ra)2, —Rb O Rc C(O)N(Ra)2, —Rb N(Ra)C(O)ORa, —Rb N(Ra)C(O)Ra, —Rb N(Ra)S(O)tRa (where t is 1 or 2), —Rb S(O)tRa (where t is 1 or 2), —Rb S(O)tORa (where t is 1 or 2), and —Rb S(O)tN(Ra)2 (where t is 1 or 2); and alkyl, alkenyl, alkynyl, aryl, aralkyl, aralkenyl, aralkynyl, cycloalkyl, cycloalkylalkyl, heterocycloalkyl, heterocycloalkylalkyl, heteroaryl, and heteroarylalkyl, any of which may be optionally substituted by alkyl, alkenyl, alkynyl, halogen, haloalkyl, haloalkenyl, haloalkynyl, oxo (═O), thioxo (═S), cyano (—CN), nitro (—NO2), imino (═N—H), oximo (═N—OH), hydrazine (═N—NH2), —Rb ORa, —Rb OC(O) Ra, —Rb OC(O) ORa, —Rb OC(O) N(Ra)2, —Rb N(Ra)2, —Rb C(O)Ra, —Rb C(O)ORa, —Rb C(O)N(Ra)2, —Rb O Rc C(O)N(Ra)2, —Rb N(Ra)C(O)ORa, —Rb N(Ra)C(O)Ra, —Rb N(Ra)S(O)tRa (where t is 1 or 2), —Rb S(O)tRa (where t is 1 or 2), —Rb S(O)tORa (where t is 1 or 2) and —Rb S(O)tN(Ra)2 (where t is 1 or 2); wherein each Ra is independently selected from hydrogen, alkyl, cycloalkyl, cycloalkylalkyl, aryl, aralkyl, heterocycloalkyl, heterocycloalkylalkyl, heteroaryl, or heteroarylalkyl, wherein each Ra, valence permitting, may be optionally substituted with alkyl, alkenyl, alkynyl, halogen, haloalkyl, haloalkenyl, haloalkynyl, oxo (═O), thioxo (═S), cyano (—CN), nitro (—NO2), imino (═N—H), oximo (═N—OH), hydrazine (═N—NH2), —Rb ORa, —Rb OC(O) Ra, —Rb OC(O) ORa, —Rb OC(O) N(Ra)2, —Rb N(Ra)2, —Rb C(O)Ra, —Rb C(O)ORa, —Rb C(O)N(Ra)2, —Rb O Rc C(O)N(Ra)2, —Rb N(Ra)C(O)ORa, —Rb N(Ra)C(O)Ra, —Rb N(Ra)S(O)tRa (where t is 1 or 2), —Rb S(O)tRa (where t is 1 or 2), —Rb S(O)tORa (where t is 1 or 2) and —Rb S(O)tN(Ra)2 (where t is 1 or 2); and wherein each Rb is independently selected from a direct bond or a straight or branched alkylene, alkenylene, or alkynylene chain, and each Rc is a straight or branched alkylene, alkenylene or alkynylene chain.

[0271] Double bonds to oxygen atoms, such as oxo groups, are represented herein as both “═O” and “(O)”. Double bonds to nitrogen atoms are represented as both “═NR” and “(NR)”. Double bonds to sulfur atoms are represented as both “═S” and “(S)”.

[0272] In some embodiments, a “derivative” polypeptide or peptide is one that is modified, for example, by glycosylation, pegylation, phosphorylation, sulfation, reduction/alkylation, acylation, chemical coupling, or mild formalin treatment. A derivative may also be modified to contain a detectable label, either directly or indirectly, including, but not limited to, a radioisotope, fluorescent, and enzyme label.

[0273] Some embodiments refer to nucleic acid sequence information. It is contemplated that in some embodiments, thymine (T) may be interchanged with uracil (U), or vice versa. For example, some sequences in the sequence listing may recite Ts, but these may be replaced with Us in some embodiments. In some oligonucleotides with nucleic acid sequences that include uracil, the uracil may be replaced with thymine. Similarly, in some oligonucleotides with nucleic acid sequences that include thymine, the thymine may be replaced with uracil. In some embodiments, an oligonucleotide such as an siRNA comprises or consists of RNA. In some embodiments, the oligonucleotide may comprise or consist of DNA. For example, an ASO may include DNA.

[0274] Some aspects include sequences with nucleotide modifications or modified internucleoside linkages. Generally, and unless otherwise specified, Nf (e.g. Af, Cf, Gf, Tf, or Uf) refers to a 2′ fluoro-modified nucleoside, dN (e.g. dA, dC, dG, dT, or dU) refers to a 2′ deoxy nucleoside, n (e.g. a, c, g, t, or u) refers to a 2′ O-methyl modified nucleoside, and “s” refers to a phosphorothioate linkage.

[0275] The section headings used herein are for organizational purposes only and are not to be construed as limiting the subject matter described.

### VI. EXAMPLES

### Example 1: A Loss of Function Variant in MTRES1 Demonstrates Protective Associations for Dementia and Alzheimer's Disease Related Traits

[0276] Variants in MTRES1 were evaluated for associations with dementia, Alzheimer's disease and related traits in approximately 452,000 individuals with genotype data fromthe UK Biobank cohort. rs117058816 is a rare (AAF=0.006) splice donor variant (c.3+1G>A) in MTRES1. This variant is considered to be a loss of function variant that results in a decrease in the abundance or activity of the MTRES1 gene product.

[0277] The analyses resulted in identification of dementia and Alzheimer's disease-related associations for the MTRES1 loss of function variant. For example, rs117058816 was associated with decreased risk of Alzheimer's disease, dementia, delirium, and vascular dementia. rs117058816 was also associated with decreased risk of family history of Alzheimer's disease and decreased risk of dementia medication use (Table 1A and 1B).

TABLE 1A
MTRES1 Dementia, Alzheimer's and related trait associations

| | | | | Alzheimer's Disease | | Family History of Alzheimer's | |
|---|---|---|---|---|---|---|---|
| | | | | (n = 2,864) | | Disease (n = 53,344) | |
| Variant | Gene | Function | AAF | P value | OR | P value | OR |
| rs117058816 | MTRES1 | Splice donor; | 0.006 | 2.58E−04 | ↓0.459 | 9.54E−03 | ↓0.893 |
| | | c.3 + 1G > A | | | | | |

TABLE 1B
MTRES1 Dementia, Alzheimer's and related trait associations

| | Dementia | | Anticholinesterase | | Delirium | | Vascular Dementia | |
|---|---|---|---|---|---|---|---|---|
| | (n = 4,009) | | Medication (n = 813) | | (n = 3,901) | | (n = 807) | |
| Variant | P value | OR | P value | OR | P value | OR | P value | OR |
| rs117058816 | 7.92E−07 | ↓0.489 | 8.04E−03 | ↓0.613 | 7.75E−03 | ↓0.667 | 7.44E−04 | ↓0.208 |

[0278] These results indicate that loss of function of MTRES1 results in protection from dementia and Alzheimer's disease and related diseases. These results further indicate that therapeutic inhibition of MTRES1 may result in similar disease-protective effects.

Protective variants in MTRES1 result in a reduction of MTRES1 mRNA and MTRES1 protein

[0279] Minigene expression constructs encoding for wild type and rs117058816 (c.3+1G>A) MTRES1 proteins were generated. Minigene constructs (<10 kb) are easier to synthesize and have greater transfection efficiency in downstream experiments than constructs that exceed 10 kb in length. The minigene constructs have a portion of internal, intronic sequence removed, but retain all exons and UTRs. Therefore, the pre-mRNA of the exons, reduced introns, and 5′ and 3′ UTRs of the protein coding transcript (ENST00000625458) of MTRES1 was cloned into a pcDNA3.1(+) vector driven by a CMV promoter. Empty vector was used as control. For rs117058816 expression constructs, the A allele replaced the G allele at DNA sequence position chr6:107030108 (human genome build 38). This leads to the loss of a splice donor site (c.3+1G>A).

[0280] Transfections of HEK-293 cells were optimized. HEK-293 cells were plated in a 6-well plate in complete growth media and grown for 48 hours followed by a media change. Cells were then transfected with 2 μg of plasmid DNA and 7 μl of TransIT-2020. Cells were incubated for 48 hours, and then harvested.

[0281] Cell lysates from transfected cells were assayed to evaluate intracellular MTRES1 protein by western blot (FIG. 1). In empty vector transfected HEK-293 cells, a faint band representing endogenous MTRES1 expression was detected by western blot as a band at 24 kDa. In cells transfected with the wild type construct, significant expression of MTRES1 was detected by western blot as a band 24 kDa. In cells transfected with the rs117058816 construct, reduced MTRES1 protein compared with wild type was detected by western blot as a band between 24 kDa. When normalizing to total protein, cells transfected with the rs117058816 construct express approximately 75% less MTRES1 protein compared with cells transfected with the wild type construct (FIG. 2).

[0282] Cell lysates from transfected cells were also assayed to evaluate MTRES1 mRNA by qPCR. Cells transfected with the rs117058816 construct express approximately 60% less MTRES1 mRNA compared with cells transfected with the wild type construct (FIG. 3).

[0283] These data provide experimental verification that MTRES1 gene variants associated with protection from dementia and Alzheimer's disease result in loss of MTRES1 protein and MTRES1 mRNA abundance or function. Accordingly, in some cases therapeutic inhibition or modulation of MTRES1 may be an effective genetically-informed method of treatment for these diseases.

### Example 2: Bioinformatic Selection of Sequences in Order to Identify Therapeutic siRNAs to Downmodulate Expression of the MTRES1 mRNA

[0284] Screening sets were defined based on bioinformatic analysis. Therapeutic siRNAs were designed to target human MTRES1, and the MTRES1 sequence of at least one toxicology-relevant species, in this case, the non-human primates (NHP) rhesus and cynomolgus monkeys. Drivers for the design of the screening set were predicted specificity of the siRNAs against the transcriptome of the relevant species as well as cross-reactivity between species. Predicted specificity in human, rhesus monkey, cynomolgus monkey, mouse and rat was determined for sense (S) and antisense (AS) strands. These were assigned a “specificity score” which considers the likelihood of unintended downregulation of any other transcript by full or partial complementarity of an siRNA strand (up to 4 mismatches within positions 2-18) as well as the number and positions of mismatches. Thus, off-target(s) for antisense and sense strands of each siRNA were identified. In addition, the number of potential off-targets was used as an additional specificity factor in the specificity score. As identified, siRNAs with high specificity and a low number of predicted off-targets provide a benefit of increased targeting specificity.

[0285] In addition to selecting siRNA sequences with high sequence specificity to MTRES1 mRNA, siRNA sequences within the seed region were analyzed for similarity to seed regions of known miRNAs. siRNAs can function in a miRNA like manner via base-pairing with complementary sequences within the 3′-UTR of mRNA molecules. The complementarity typically encompasses the 5′-bases at positions 2-7 of the miRNA (seed region). To circumvent siRNAs to act via functional miRNA binding sites, siRNA strands containing natural miRNA seed regions were avoided. Seed regions identified in miRNAs from human, mouse, rat, rhesus monkey, dog, rabbit and pig are referred to as “conserved”. Combining the “specificity score” with miRNA seed analysis yielded a “specificity category”. This is divided into categories 1-4, with 1 having the highest specificity and 4 having the lowest specificity. Each strand of the siRNA is assigned to a specificity category.

[0286] Specificity and species cross-reactivity was assessed for human, cynomolgus monkey, rhesus monkey, mouse and rat MTRES1. The analysis was based on a canonical siRNA design using 19 bases and 17 bases (without considering positions 1 and 19) for cross-reactivity. Full match as well as single mismatch analyses were included.

[0287] Analysis of the human Single Nucleotide Polymorphism (SNP) database (NCBI-DB-SNP) to identify siRNAs targeting regions with known SNPs was also carried out to identify siRNAs that may be non-functional in individuals containing the SNP. Information regarding the positions of SNPs withinthe target sequence as well as minor allele frequency (MAF) in case data was obtained in this analysis.

[0288] Initial analysis of the relevant MTRES1 mRNA sequence revealed few sequences that fulfil the specificity parameters and at the same time target MTRES1 mRNA in all of the analyzed relevant species. Therefore, it was decided to design independent screening subsets for the therapeutic siRNAs.

[0289] The siRNAs in these subsets recognize the human, cynomolgus monkey, rhesus monkey MTRES1 sequences. Therefore, the siRNAs in these subsets can be used to target human MTRES1 in a therapeutic setting.

[0290] The number of siRNA sequences that can be derived from human MTRES1 mRNA (ENST00000311381.8, SEQ ID NO: 2443) without consideration of specificity or species cross-reactivity was 1140 (sense and antisense strand sequences included in SEQ ID NOS: 1-2280).

[0291] Prioritizing sequences for target specificity, species cross-reactivity, miRNA seed region sequences and SNPs as described above yields subset A. Subset A contains 82 siRNAs whose base sequences are shown in Table 2.

TABLE 2
Sequences in siRNA subset A

| siRNA | SEQ ID | sense strand sequence | SEQ ID | antisense strand sequence |
|---|---|---|---|---|
| Name | NO: | (5′-3′) | NO: | (5′-3′) |
| siRNA 78 | 78 | UAAGCGCCAUGGCUAUGGC | 1218 | GCCAUAGCCAUGGCGCUUA |
| siRNA 81 | 81 | GCGCCAUGGCUAUGGCUAG | 1221 | CUAGCCAUAGCCAUGGCGC |
| siRNA 87 | 87 | UGGCUAUGGCUAGUGUUAA | 1227 | UUAACACUAGCCAUAGCCA |
| siRNA 154 | 154 | GGGUGUUCUCCGAGGGACA | 1294 | UGUCCCUCGGAGAACACCC |
| siRNA 156 | 156 | GUGUUCUCCGAGGGACACC | 1296 | GGUGUCCCUCGGAGAACAC |
| siRNA 158 | 158 | GUUCUCCGAGGGACACCUU | 1298 | AAGGUGUCCCUCGGAGAAC |
| siRNA 178 | 178 | AUCAUACAAACUCUGUACU | 1318 | AGUACAGAGUUUGUAUGAU |
| siRNA 182 | 182 | UACAAACUCUGUACUUCCU | 1322 | AGGAAGUACAGAGUUUGUA |
| siRNA 190 | 190 | CUGUACUUCCUGGAAUCGA | 1330 | UCGAUUCCAGGAAGUACAG |
| siRNA 191 | 191 | UGUACUUCCUGGAAUCGAU | 1331 | AUCGAUUCCAGGAAGUACA |
| siRNA 192 | 192 | GUACUUCCUGGAAUCGAUA | 1332 | UAUCGAUUCCAGGAAGUAC |
| siRNA 193 | 193 | UACUUCCUGGAAUCGAUAC | 1333 | GUAUCGAUUCCAGGAAGUA |
| siRNA 194 | 194 | ACUUCCUGGAAUCGAUACU | 1334 | AGUAUCGAUUCCAGGAAGU |
| siRNA 195 | 195 | CUUCCUGGAAUCGAUACUU | 1335 | AAGUAUCGAUUCCAGGAAG |
| siRNA 197 | 197 | UCCUGGAAUCGAUACUUGU | 1337 | ACAAGUAUCGAUUCCAGGA |
| siRNA 198 | 198 | CCUGGAAUCGAUACUUGUA | 1338 | UACAAGUAUCGAUUCCAGG |
| siRNA 199 | 199 | CUGGAAUCGAUACUUGUAU | 1339 | AUACAAGUAUCGAUUCCAG |
| siRNA 202 | 202 | GAAUCGAUACUUGUAUUUU | 1342 | AAAAUACAAGUAUCGAUUC |
| siRNA 220 | 220 | UUCUAGUACCAAGUUACGU | 1360 | ACGUAACUUGGUACUAGAA |
| siRNA 222 | 222 | CUAGUACCAAGUUACGUGC | 1362 | GCACGUAACUUGGUACUAG |
| siRNA 223 | 223 | UAGUACCAAGUUACGUGCA | 1363 | UGCACGUAACUUGGUACUA |
| siRNA 224 | 224 | AGUACCAAGUUACGUGCAC | 1364 | GUGCACGUAACUUGGUACU |
| siRNA 225 | 225 | GUACCAAGUUACGUGCACC | 1365 | GGUGCACGUAACUUGGUAC |
| siRNA 226 | 226 | UACCAAGUUACGUGCACCA | 1366 | UGGUGCACGUAACUUGGUA |
| siRNA 227 | 227 | ACCAAGUUACGUGCACCAA | 1367 | UUGGUGCACGUAACUUGGU |
| siRNA 228 | 228 | CCAAGUUACGUGCACCAAA | 1368 | UUUGGUGCACGUAACUUGG |
| siRNA 229 | 229 | CAAGUUACGUGCACCAAAU | 1369 | AUUUGGUGCACGUAACUUG |
| siRNA 230 | 230 | AAGUUACGUGCACCAAAUU | 1370 | AAUUUGGUGCACGUAACUU |
| siRNA 231 | 231 | AGUUACGUGCACCAAAUUA | 1371 | UAAUUUGGUGCACGUAACU |
| siRNA 232 | 232 | GUUACGUGCACCAAAUUAU | 1372 | AUAAUUUGGUGCACGUAAC |
| siRNA 233 | 233 | UUACGUGCACCAAAUUAUA | 1373 | UAUAAUUUGGUGCACGUAA |
| SiRNA 235 | 235 | ACGUGCACCAAAUUAUAAA | 1375 | UUUAUAAUUUGGUGCACGU |
| siRNA 331 | 331 | AAGACUCAAAAGUAAUAUA | 1471 | UAUAUUACUUUUGAGUCUU |
| siRNA 358 | 358 | AAAAUCUACUAAAAAGUCU | 1498 | AGACUUUUUAGUAGAUUUU |
| siRNA 360 | 360 | AAUCUACUAAAAAGUCUCU | 1500 | AGAGACUUUUUAGUAGAUU |
| siRNA 361 | 361 | AUCUACUAAAAAGUCUCUG | 1501 | CAGAGACUUUUUAGUAGAU |
| siRNA 362 | 362 | UCUACUAAAAAGUCUCUGC | 1502 | GCAGAGACUUUUUAGUAGA |
| siRNA 528 | 528 | UGAAGACGGGGCUAGAUAU | 1668 | AUAUCUAGCCCCGUCUUCA |
| siRNA 534 | 534 | CGGGGCUAGAUAUUGGGAG | 1674 | CUCCCAAUAUCUAGCCCCG |
| siRNA 539 | 539 | CUAGAUAUUGGGAGAAACA | 1679 | UGUUUCUCCCAAUAUCUAG |
| siRNA 619 | 619 | AAGCAGAACGGUGAAAGUG | 1759 | CACUUUCACCGUUCUGCUU |
| siRNA 620 | 620 | AGCAGAACGGUGAAAGUGG | 1760 | CCACUUUCACCGUUCUGCU |
| siRNA 621 | 621 | GCAGAACGGUGAAAGUGGG | 1761 | CCCACUUUCACCGUUCUGC |
| siRNA 632 | 632 | AAAGUGGGAGAUACAUUGG | 1772 | CCAAUGUAUCUCCCACUUU |
| siRNA 633 | 633 | AAGUGGGAGAUACAUUGGA | 1773 | UCCAAUGUAUCUCCCACUU |
| siRNA 634 | 634 | AGUGGGAGAUACAUUGGAU | 1774 | AUCCAAUGUAUCUCCCACU |
| siRNA 636 | 636 | UGGGAGAUACAUUGGAUCU | 1776 | AGAUCCAAUGUAUCUCCCA |
| siRNA 642 | 642 | AUACAUUGGAUCUUCUCAU | 1782 | AUGAGAAGAUCCAAUGUAU |
| siRNA 645 | 645 | CAUUGGAUCUUCUCAUUGG | 1785 | CCAAUGAGAAGAUCCAAUG |
| siRNA 646 | 646 | AUUGGAUCUUCUCAUUGGA | 1786 | UCCAAUGAGAAGAUCCAAU |
| siRNA 647 | 647 | UUGGAUCUUCUCAUUGGAG | 1787 | CUCCAAUGAGAAGAUCCAA |
| siRNA 648 | 648 | UGGAUCUUCUCAUUGGAGA | 1788 | UCUCCAAUGAGAAGAUCCA |
| siRNA 650 | 650 | GAUCUUCUCAUUGGAGAGG | 1790 | CCUCUCCAAUGAGAAGAUC |
| siRNA 654 | 654 | UUCUCAUUGGAGAGGAUAA | 1794 | UUAUCCUCUCCAAUGAGAA |
| siRNA 656 | 656 | CUCAUUGGAGAGGAUAAAG | 1796 | CUUUAUCCUCUCCAAUGAG |
| siRNA 687 | 687 | AGACAGUUAUGCGGAUUCU | 1827 | AGAAUCCGCAUAACUGUCU |
| siRNA 688 | 688 | GACAGUUAUGCGGAUUCUC | 1828 | GAGAAUCCGCAUAACUGUC |
| siRNA 690 | 690 | CAGUUAUGCGGAUUCUCUU | 1830 | AAGAGAAUCCGCAUAACUG |
| siRNA 693 | 693 | UUAUGCGGAUUCUCUUGAA | 1833 | UUCAAGAGAAUCCGCAUAA |
| siRNA 694 | 694 | UAUGCGGAUUCUCUUGAAA | 1834 | UUUCAAGAGAAUCCGCAUA |
| siRNA 695 | 695 | AUGCGGAUUCUCUUGAAAA | 1835 | UUUUCAAGAGAAUCCGCAU |
| siRNA 745 | 745 | AUACAGAGUGGUGUUACGG | 1885 | CCGUAACACCACUCUGUAU |
| siRNA 746 | 746 | UACAGAGUGGUGUUACGGC | 1886 | GCCGUAACACCACUCUGUA |
| siRNA 748 | 748 | CAGAGUGGUGUUACGGCGG | 1888 | CCGCCGUAACACCACUCUG |
| SiRNA 749 | 749 | AGAGUGGUGUUACGGCGGU | 1889 | ACCGCCGUAACACCACUCU |
| siRNA 751 | 751 | AGUGGUGUUACGGCGGUGG | 1891 | CCACCGCCGUAACACCACU |
| siRNA 752 | 752 | GUGGUGUUACGGCGGUGGA | 1892 | UCCACCGCCGUAACACCAC |
| siRNA 753 | 753 | UGGUGUUACGGCGGUGGAA | 1893 | UUCCACCGCCGUAACACCA |
| siRNA 754 | 754 | GGUGUUACGGCGGUGGAAA | 1894 | UUUCCACCGCCGUAACACC |
| siRNA 755 | 755 | GUGUUACGGCGGUGGAAAA | 1895 | UUUUCCACCGCCGUAACAC |
| siRNA 756 | 756 | UGUUACGGCGGUGGAAAAG | 1896 | CUUUUCCACCGCCGUAACA |
| siRNA 757 | 757 | GUUACGGCGGUGGAAAAGU | 1897 | ACUUUUCCACCGCCGUAAC |
| siRNA 758 | 758 | UUACGGCGGUGGAAAAGUU | 1898 | AACUUUUCCACCGCCGUAA |
| siRNA 759 | 759 | UACGGCGGUGGAAAAGUUU | 1899 | AAACUUUUCCACCGCCGUA |
| siRNA 761 | 761 | CGGCGGUGGAAAAGUUUAA | 1901 | UUAAACUUUUCCACCGCCG |
| siRNA 773 | 773 | AGUUUAAAGUUGCCUAAGA | 1913 | UCUUAGGCAACUUUAAACU |
| siRNA 775 | 775 | UUUAAAGUUGCCUAAGAAG | 1915 | CUUCUUAGGCAACUUUAAA |
| SiRNA 808 | 808 | AAUGGAUUGCUUUUUAGCA | 1948 | UGCUAAAAAGCAAUCCAUU |
| siRNA 810 | 810 | UGGAUUGCUUUUUAGCAAU | 1950 | AUUGCUAAAAAGCAAUCCA |
| siRNA 852 | 852 | GAAGGGGUCACCUGAAAAA | 1992 | UUUUUCAGGUGACCCCUUC |
| siRNA 853 | 853 | AAGGGGUCACCUGAAAAAU | 1993 | AUUUUUCAGGUGACCCCUU |
| siRNA 887 | 887 | AAAUAAAGUUCUCUUAGCG | 2027 | CGCUAAGAGAACUUUAUUU |

[0292] The siRNAs in subset A have the following characteristics:
[0293] Cross-reactivity: With 19mer in human MTRES1 mRNA, with 17mer/19mer in NHP MTRES1
[0294] Specificity category: For human and NHP: AS2 or better, SS3 or better
[0295] miRNA seeds: AS+SS strand: seed region not conserved in human, mouse, and rat and not present in >4 species
[0296] Off-target frequency: ≤20 human off-targets matched with 2 mismatches in antisense strand
[0297] SNPs: siRNA target sites do not harbor SNPs with a MAF≥100 (pos. 2-18)

[0298] The siRNA sequences in subset A were selected for more stringent specificity to yield subset B. Subset B includes 73 siRNAs whose base sequences are shown in Table 3.

TABLE 3
Sequences in siRNA subset B

| SEQ ID | sense strand sequence | SEQ ID | antisense strand sequence |
|---|---|---|---|
| NO: | (5′-3′) | NO: | (5′-3′) |
| 78 | UAAGCGCCAUGGCUAUGGC | 1218 | GCCAUAGCCAUGGCGCUUA |
| 81 | GCGCCAUGGCUAUGGCUAG | 1221 | CUAGCCAUAGCCAUGGCGC |
| 87 | UGGCUAUGGCUAGUGUUAA | 1227 | UUAACACUAGCCAUAGCCA |
| 154 | GGGUGUUCUCCGAGGGACA | 1294 | UGUCCCUCGGAGAACACCC |
| 156 | GUGUUCUCCGAGGGACACC | 1296 | GGUGUCCCUCGGAGAACAC |
| 158 | GUUCUCCGAGGGACACCUU | 1298 | AAGGUGUCCCUCGGAGAAC |
| 178 | AUCAUACAAACUCUGUACU | 1318 | AGUACAGAGUUUGUAUGAU |
| 182 | UACAAACUCUGUACUUCCU | 1322 | AGGAAGUACAGAGUUUGUA |
| 190 | CUGUACUUCCUGGAAUCGA | 1330 | UCGAUUCCAGGAAGUACAG |
| 191 | UGUACUUCCUGGAAUCGAU | 1331 | AUCGAUUCCAGGAAGUACA |
| 192 | GUACUUCCUGGAAUCGAUA | 1332 | UAUCGAUUCCAGGAAGUAC |
| 193 | UACUUCCUGGAAUCGAUAC | 1333 | GUAUCGAUUCCAGGAAGUA |
| 195 | CUUCCUGGAAUCGAUACUU | 1335 | AAGUAUCGAUUCCAGGAAG |
| 197 | UCCUGGAAUCGAUACUUGU | 1337 | ACAAGUAUCGAUUCCAGGA |
| 198 | CCUGGAAUCGAUACUUGUA | 1338 | UACAAGUAUCGAUUCCAGG |
| 199 | CUGGAAUCGAUACUUGUAU | 1339 | AUACAAGUAUCGAUUCCAG |
| 202 | GAAUCGAUACUUGUAUUUU | 1342 | AAAAUACAAGUAUCGAUUC |
| 220 | UUCUAGUACCAAGUUACGU | 1360 | ACGUAACUUGGUACUAGAA |
| 222 | CUAGUACCAAGUUACGUGC | 1362 | GCACGUAACUUGGUACUAG |
| 223 | UAGUACCAAGUUACGUGCA | 1363 | UGCACGUAACUUGGUACUA |
| 224 | AGUACCAAGUUACGUGCAC | 1364 | GUGCACGUAACUUGGUACU |
| 225 | GUACCAAGUUACGUGCACC | 1365 | GGUGCACGUAACUUGGUAC |
| 226 | UACCAAGUUACGUGCACCA | 1366 | UGGUGCACGUAACUUGGUA |
| 227 | ACCAAGUUACGUGCACCAA | 1367 | UUGGUGCACGUAACUUGGU |
| 228 | CCAAGUUACGUGCACCAAA | 1368 | UUUGGUGCACGUAACUUGG |
| 229 | CAAGUUACGUGCACCAAAU | 1369 | AUUUGGUGCACGUAACUUG |
| 230 | AAGUUACGUGCACCAAAUU | 1370 | AAUUUGGUGCACGUAACUU |
| 231 | AGUUACGUGCACCAAAUUA | 1371 | UAAUUUGGUGCACGUAACU |
| 232 | GUUACGUGCACCAAAUUAU | 1372 | AUAAUUUGGUGCACGUAAC |
| 233 | UUACGUGCACCAAAUUAUA | 1373 | UAUAAUUUGGUGCACGUAA |
| 235 | ACGUGCACCAAAUUAUAAA | 1375 | UUUAUAAUUUGGUGCACGU |
| 358 | AAAAUCUACUAAAAAGUCU | 1498 | AGACUUUUUAGUAGAUUUU |
| 360 | AAUCUACUAAAAAGUCUCU | 1500 | AGAGACUUUUUAGUAGAUU |
| 362 | UCUACUAAAAAGUCUCUGC | 1502 | GCAGAGACUUUUUAGUAGA |
| 528 | UGAAGACGGGGCUAGAUAU | 1668 | AUAUCUAGCCCCGUCUUCA |
| 534 | CGGGGCUAGAUAUUGGGAG | 1674 | CUCCCAAUAUCUAGCCCCG |
| 539 | CUAGAUAUUGGGAGAAACA | 1679 | UGUUUCUCCCAAUAUCUAG |
| 619 | AAGCAGAACGGUGAAAGUG | 1759 | CACUUUCACCGUUCUGCUU |
| 620 | AGCAGAACGGUGAAAGUGG | 1760 | CCACUUUCACCGUUCUGCU |
| 621 | GCAGAACGGUGAAAGUGGG | 1761 | CCCACUUUCACCGUUCUGC |
| 632 | AAAGUGGGAGAUACAUUGG | 1772 | CCAAUGUAUCUCCCACUUU |
| 633 | AAGUGGGAGAUACAUUGGA | 1773 | UCCAAUGUAUCUCCCACUU |
| 636 | UGGGAGAUACAUUGGAUCU | 1776 | AGAUCCAAUGUAUCUCCCA |
| 642 | AUACAUUGGAUCUUCUCAU | 1782 | AUGAGAAGAUCCAAUGUAU |
| 645 | CAUUGGAUCUUCUCAUUGG | 1785 | CCAAUGAGAAGAUCCAAUG |
| 647 | UUGGAUCUUCUCAUUGGAG | 1787 | CUCCAAUGAGAAGAUCCAA |
| 648 | UGGAUCUUCUCAUUGGAGA | 1788 | UCUCCAAUGAGAAGAUCCA |
| 654 | UUCUCAUUGGAGAGGAUAA | 1794 | UUAUCCUCUCCAAUGAGAA |
| 656 | CUCAUUGGAGAGGAUAAAG | 1796 | CUUUAUCCUCUCCAAUGAG |
| 687 | AGACAGUUAUGCGGAUUCU | 1827 | AGAAUCCGCAUAACUGUCU |
| 688 | GACAGUUAUGCGGAUUCUC | 1828 | GAGAAUCCGCAUAACUGUC |
| 690 | CAGUUAUGCGGAUUCUCUU | 1830 | AAGAGAAUCCGCAUAACUG |
| 693 | UUAUGCGGAUUCUCUUGAA | 1833 | UUCAAGAGAAUCCGCAUAA |
| 694 | UAUGCGGAUUCUCUUGAAA | 1834 | UUUCAAGAGAAUCCGCAUA |
| 695 | AUGCGGAUUCUCUUGAAAA | 1835 | UUUUCAAGAGAAUCCGCAU |
| 745 | AUACAGAGUGGUGUUACGG | 1885 | CCGUAACACCACUCUGUAU |
| 746 | UACAGAGUGGUGUUACGGC | 1886 | GCCGUAACACCACUCUGUA |
| 748 | CAGAGUGGUGUUACGGCGG | 1888 | CCGCCGUAACACCACUCUG |
| 749 | AGAGUGGUGUUACGGCGGU | 1889 | ACCGCCGUAACACCACUCU |
| 751 | AGUGGUGUUACGGCGGUGG | 1891 | CCACCGCCGUAACACCACU |
| 752 | GUGGUGUUACGGCGGUGGA | 1892 | UCCACCGCCGUAACACCAC |
| 753 | UGGUGUUACGGCGGUGGAA | 1893 | UUCCACCGCCGUAACACCA |
| 754 | GGUGUUACGGCGGUGGAAA | 1894 | UUUCCACCGCCGUAACACC |
| 755 | GUGUUACGGCGGUGGAAAA | 1895 | UUUUCCACCGCCGUAACAC |
| 756 | UGUUACGGCGGUGGAAAAG | 1896 | CUUUUCCACCGCCGUAACA |
| 757 | GUUACGGCGGUGGAAAAGU | 1897 | ACUUUUCCACCGCCGUAAC |
| 758 | UUACGGCGGUGGAAAAGUU | 1898 | AACUUUUCCACCGCCGUAA |
| 759 | UACGGCGGUGGAAAAGUUU | 1899 | AAACUUUUCCACCGCCGUA |
| 761 | CGGCGGUGGAAAAGUUUAA | 1901 | UUAAACUUUUCCACCGCCG |
| 773 | AGUUUAAAGUUGCCUAAGA | 1913 | UCUUAGGCAACUUUAAACU |
| 808 | AAUGGAUUGCUUUUUAGCA | 1948 | UGCUAAAAAGCAAUCCAUU |
| 852 | GAAGGGGUCACCUGAAAAA | 1992 | UUUUUCAGGUGACCCCUUC |
| 853 | AAGGGGUCACCUGAAAAAU | 1993 | AUUUUUCAGGUGACCCCUU |

[0299] The siRNAs in subset B have the following characteristics:
[0300] Cross-reactivity: With 19mer in human MTRES1 mRNA, with 17mer/19mer in NHP MTRES1
[0301] Specificity category: For human and NHP: AS2 or better, SS3 or better
[0302] miRNA seeds: AS+SS strand: seed region not conserved in human, mouse, and rat and not present in >4 species
[0303] Off-target frequency: <15 human off-targets matched with 2 mismatches in antisense strand
[0304] SNPs: siRNA target sites do not harbor SNPs with a MAF ≥1% (pos. 2-18)

[0305] The siRNA sequences in subset B were further selected for absence of seed regions in the AS strand that are identical to a seed region of known human miRNA to yield subset C. Subset C includes 54 siRNAs whose base sequences are shown in Table 4.

TABLE 4
Sequences in siRNA subset C

| SEQ ID | sense strand sequence | SEQ ID | antisense strand sequence |
|---|---|---|---|
| NO: | (5′-3′) | NO: | (5′-3′) |
| 78 | UAAGCGCCAUGGCUAUGGC | 1218 | GCCAUAGCCAUGGCGCUUA |
| 87 | UGGCUAUGGCUAGUGUUAA | 1227 | UUAACACUAGCCAUAGCCA |
| 154 | GGGUGUUCUCCGAGGGACA | 1294 | UGUCCCUCGGAGAACACCC |
| 158 | GUUCUCCGAGGGACACCUU | 1298 | AAGGUGUCCCUCGGAGAAC |
| 178 | AUCAUACAAACUCUGUACU | 1318 | AGUACAGAGUUUGUAUGAU |
| 182 | UACAAACUCUGUACUUCCU | 1322 | AGGAAGUACAGAGUUUGUA |
| 190 | CUGUACUUCCUGGAAUCGA | 1330 | UCGAUUCCAGGAAGUACAG |
| 191 | UGUACUUCCUGGAAUCGAU | 1331 | AUCGAUUCCAGGAAGUACA |
| 192 | GUACUUCCUGGAAUCGAUA | 1332 | UAUCGAUUCCAGGAAGUAC |
| 193 | UACUUCCUGGAAUCGAUAC | 1333 | GUAUCGAUUCCAGGAAGUA |
| 195 | CUUCCUGGAAUCGAUACUU | 1335 | AAGUAUCGAUUCCAGGAAG |
| 199 | CUGGAAUCGAUACUUGUAU | 1339 | AUACAAGUAUCGAUUCCAG |
| 202 | GAAUCGAUACUUGUAUUUU | 1342 | AAAAUACAAGUAUCGAUUC |
| 220 | UUCUAGUACCAAGUUACGU | 1360 | ACGUAACUUGGUACUAGAA |
| 222 | CUAGUACCAAGUUACGUGC | 1362 | GCACGUAACUUGGUACUAG |
| 223 | UAGUACCAAGUUACGUGCA | 1363 | UGCACGUAACUUGGUACUA |
| 224 | AGUACCAAGUUACGUGCAC | 1364 | GUGCACGUAACUUGGUACU |
| 225 | GUACCAAGUUACGUGCACC | 1365 | GGUGCACGUAACUUGGUAC |
| 226 | UACCAAGUUACGUGCACCA | 1366 | UGGUGCACGUAACUUGGUA |
| 227 | ACCAAGUUACGUGCACCAA | 1367 | UUGGUGCACGUAACUUGGU |
| 228 | CCAAGUUACGUGCACCAAA | 1368 | UUUGGUGCACGUAACUUGG |
| 229 | CAAGUUACGUGCACCAAAU | 1369 | AUUUGGUGCACGUAACUUG |
| 231 | AGUUACGUGCACCAAAUUA | 1371 | UAAUUUGGUGCACGUAACU |
| 233 | UUACGUGCACCAAAUUAUA | 1373 | UAUAAUUUGGUGCACGUAA |
| 235 | ACGUGCACCAAAUUAUAAA | 1375 | UUUAUAAUUUGGUGCACGU |
| 358 | AAAAUCUACUAAAAAGUCU | 1498 | AGACUUUUUAGUAGAUUUU |
| 528 | UGAAGACGGGGCUAGAUAU | 1668 | AUAUCUAGCCCCGUCUUCA |
| 534 | CGGGGCUAGAUAUUGGGAG | 1674 | CUCCCAAUAUCUAGCCCCG |
| 539 | CUAGAUAUUGGGAGAAACA | 1679 | UGUUUCUCCCAAUAUCUAG |
| 619 | AAGCAGAACGGUGAAAGUG | 1759 | CACUUUCACCGUUCUGCUU |
| 620 | AGCAGAACGGUGAAAGUGG | 1760 | CCACUUUCACCGUUCUGCU |
| 621 | GCAGAACGGUGAAAGUGGG | 1761 | CCCACUUUCACCGUUCUGC |
| 632 | AAAGUGGGAGAUACAUUGG | 1772 | CCAAUGUAUCUCCCACUUU |
| 633 | AAGUGGGAGAUACAUUGGA | 1773 | UCCAAUGUAUCUCCCACUU |
| 636 | UGGGAGAUACAUUGGAUCU | 1776 | AGAUCCAAUGUAUCUCCCA |
| 645 | CAUUGGAUCUUCUCAUUGG | 1785 | CCAAUGAGAAGAUCCAAUG |
| 647 | UUGGAUCUUCUCAUUGGAG | 1787 | CUCCAAUGAGAAGAUCCAA |
| 656 | CUCAUUGGAGAGGAUAAAG | 1796 | CUUUAUCCUCUCCAAUGAG |
| 687 | AGACAGUUAUGCGGAUUCU | 1827 | AGAAUCCGCAUAACUGUCU |
| 688 | GACAGUUAUGCGGAUUCUC | 1828 | GAGAAUCCGCAUAACUGUC |
| 745 | AUACAGAGUGGUGUUACGG | 1885 | CCGUAACACCACUCUGUAU |
| 746 | UACAGAGUGGUGUUACGGC | 1886 | GCCGUAACACCACUCUGUA |
| 748 | CAGAGUGGUGUUACGGCGG | 1888 | CCGCCGUAACACCACUCUG |
| 749 | AGAGUGGUGUUACGGCGGU | 1889 | ACCGCCGUAACACCACUCU |
| 751 | AGUGGUGUUACGGCGGUGG | 1891 | CCACCGCCGUAACACCACU |
| 752 | GUGGUGUUACGGCGGUGGA | 1892 | UCCACCGCCGUAACACCAC |
| 753 | UGGUGUUACGGCGGUGGAA | 1893 | UUCCACCGCCGUAACACCA |
| 755 | GUGUUACGGCGGUGGAAAA | 1895 | UUUUCCACCGCCGUAACAC |
| 756 | UGUUACGGCGGUGGAAAAG | 1896 | CUUUUCCACCGCCGUAACA |
| 759 | UACGGCGGUGGAAAAGUUU | 1899 | AAACUUUUCCACCGCCGUA |
| 761 | CGGCGGUGGAAAAGUUUAA | 1901 | UUAAACUUUUCCACCGCCG |
| 773 | AGUUUAAAGUUGCCUAAGA | 1913 | UCUUAGGCAACUUUAAACU |
| 808 | AAUGGAUUGCUUUUUAGCA | 1948 | UGCUAAAAAGCAAUCCAUU |
| 853 | AAGGGGUCACCUGAAAAAU | 1993 | AUUUUUCAGGUGACCCCUU |

[0306] The siRNAs in subset C have the following characteristics:
[0307] Cross-reactivity: With 19mer in human MTRES1 mRNA, with 17mer/19mer in NHP MTRES1
[0308] Specificity category: For human and NHP: AS2 or better, SS3 or better
[0309] miRNA seeds: AS+SS strand: seed region not conserved in human, mouse, and rat and not present in >4 species. AS strand: seed region not identical to seed region of known human miRNA
[0310] Off-target frequency: ≤15 human off-targets matched with 2 mismatches by antisense strand
[0311] SNPs: siRNA target sites do not harbor SNPs with a MAF≥1% (pos. 2-18)

[0312] The siRNA sequences in subset C were also selected for absence of seed regions in the AS or S strands that are identical to a seed region of known human miRNA to yield subset D. Subset D includes 35 siRNAs whose base sequences are shown in Table 5.

TABLE 5
Sequences in siRNA subset D

| SEQ ID | sense strand sequence | SEQ ID | antisense strand sequence |
|---|---|---|---|
| NO: | (5′-3′) | NO: | (5′-3′) |
| 87 | UGGCUAUGGCUAGUGUUAA | 1227 | UUAACACUAGCCAUAGCCA |
| 182 | UACAAACUCUGUACUUCCU | 1322 | AGGAAGUACAGAGUUUGUA |
| 190 | CUGUACUUCCUGGAAUCGA | 1330 | UCGAUUCCAGGAAGUACAG |
| 191 | UGUACUUCCUGGAAUCGAU | 1331 | AUCGAUUCCAGGAAGUACA |
| 193 | UACUUCCUGGAAUCGAUAC | 1333 | GUAUCGAUUCCAGGAAGUA |
| 194 | ACUUCCUGGAAUCGAUACU | 1334 | AGUAUCGAUUCCAGGAAGU |
| 202 | GAAUCGAUACUUGUAUUUU | 1342 | AAAAUACAAGUAUCGAUUC |
| 220 | UUCUAGUACCAAGUUACGU | 1360 | ACGUAACUUGGUACUAGAA |
| 222 | CUAGUACCAAGUUACGUGC | 1362 | GCACGUAACUUGGUACUAG |
| 224 | AGUACCAAGUUACGUGCAC | 1364 | GUGCACGUAACUUGGUACU |
| 225 | GUACCAAGUUACGUGCACC | 1365 | GGUGCACGUAACUUGGUAC |
| 226 | UACCAAGUUACGUGCACCA | 1366 | UGGUGCACGUAACUUGGUA |
| 228 | CCAAGUUACGUGCACCAAA | 1368 | UUUGGUGCACGUAACUUGG |
| 229 | CAAGUUACGUGCACCAAAU | 1369 | AUUUGGUGCACGUAACUUG |
| 231 | AGUUACGUGCACCAAAUUA | 1371 | UAAUUUGGUGCACGUAACU |
| 233 | UUACGUGCACCAAAUUAUA | 1373 | UAUAAUUUGGUGCACGUAA |
| 358 | AAAAUCUACUAAAAAGUCU | 1498 | AGACUUUUUAGUAGAUUUU |
| 361 | AUCUACUAAAAAGUCUCUG | 1501 | CAGAGACUUUUUAGUAGAU |
| 528 | UGAAGACGGGGCUAGAUAU | 1668 | AUAUCUAGCCCCGUCUUCA |
| 539 | CUAGAUAUUGGGAGAAACA | 1679 | UGUUUCUCCCAAUAUCUAG |
| 619 | AAGCAGAACGGUGAAAGUG | 1759 | CACUUUCACCGUUCUGCUU |
| 645 | CAUUGGAUCUUCUCAUUGG | 1785 | CCAAUGAGAAGAUCCAAUG |
| 647 | UUGGAUCUUCUCAUUGGAG | 1787 | CUCCAAUGAGAAGAUCCAA |
| 688 | GACAGUUAUGCGGAUUCUC | 1828 | GAGAAUCCGCAUAACUGUC |
| 745 | AUACAGAGUGGUGUUACGG | 1885 | CCGUAACACCACUCUGUAU |
| 751 | AGUGGUGUUACGGCGGUGG | 1891 | CCACCGCCGUAACACCACU |
| 752 | GUGGUGUUACGGCGGUGGA | 1892 | UCCACCGCCGUAACACCAC |
| 755 | GUGUUACGGCGGUGGAAAA | 1895 | UUUUCCACCGCCGUAACAC |
| 756 | UGUUACGGCGGUGGAAAAG | 1896 | CUUUUCCACCGCCGUAACA |
| 759 | UACGGCGGUGGAAAAGUUU | 1899 | AAACUUUUCCACCGCCGUA |
| 761 | CGGCGGUGGAAAAGUUUAA | 1901 | UUAAACUUUUCCACCGCCG |
| 773 | AGUUUAAAGUUGCCUAAGA | 1913 | UCUUAGGCAACUUUAAACU |
| 775 | UUUAAAGUUGCCUAAGAAG | 1915 | CUUCUUAGGCAACUUUAAA |
| 810 | UGGAUUGCUUUUUAGCAAU | 1950 | AUUGCUAAAAAGCAAUCCA |
| 887 | AAAUAAAGUUCUCUUAGCG | 2027 | CGCUAAGAGAACUUUAUUU |

[0313] The siRNAs in subset D have the following characteristics:
[0314] Cross-reactivity: With 19mer in human MTRES1 mRNA, with 17mer/19mer in NHP MTRES1
[0315] Specificity category: For human and NHP: AS2 or better, SS3 or better
[0316] miRNA seeds: AS+SS strand: seed region not conserved in human, mouse, and rat and not present in >4 species. AS+SS strand: seed region not identical to seed region of known human miRNA
[0317] Off-target frequency: <20 human off-targets matched with 2 mismatches by antisense strand
[0318] SNPs: siRNA target sites do not harbor SNPs with a MAF≥1% (pos. 2-18)

[0319] The siRNA sequences in subset D were further selected for more stringent specificity to yield subset E. Subset E includes 30 siRNAs whose base sequences are shown in Table 6.

TABLE 6
Sequences in siRNA subset E

| SEQ ID | sense strand sequence | SEQ ID | antisense strand sequence |
|---|---|---|---|
| NO: | (5′-3′) | NO: | (5′-3′) |
| 87 | UGGCUAUGGCUAGUGUUAA | 1227 | UUAACACUAGCCAUAGCCA |
| 182 | UACAAACUCUGUACUUCCU | 1322 | AGGAAGUACAGAGUUUGUA |
| 190 | CUGUACUUCCUGGAAUCGA | 1330 | UCGAUUCCAGGAAGUACAG |
| 191 | UGUACUUCCUGGAAUCGAU | 1331 | AUCGAUUCCAGGAAGUACA |
| 193 | UACUUCCUGGAAUCGAUAC | 1333 | GUAUCGAUUCCAGGAAGUA |
| 202 | GAAUCGAUACUUGUAUUUU | 1342 | AAAAUACAAGUAUCGAUUC |
| 220 | UUCUAGUACCAAGUUACGU | 1360 | ACGUAACUUGGUACUAGAA |
| 222 | CUAGUACCAAGUUACGUGC | 1362 | GCACGUAACUUGGUACUAG |
| 224 | AGUACCAAGUUACGUGCAC | 1364 | GUGCACGUAACUUGGUACU |
| 225 | GUACCAAGUUACGUGCACC | 1365 | GGUGCACGUAACUUGGUAC |
| 226 | UACCAAGUUACGUGCACCA | 1366 | UGGUGCACGUAACUUGGUA |
| 228 | CCAAGUUACGUGCACCAAA | 1368 | UUUGGUGCACGUAACUUGG |
| 229 | CAAGUUACGUGCACCAAAU | 1369 | AUUUGGUGCACGUAACUUG |
| 231 | AGUUACGUGCACCAAAUUA | 1371 | UAAUUUGGUGCACGUAACU |
| 233 | UUACGUGCACCAAAUUAUA | 1373 | UAUAAUUUGGUGCACGUAA |
| 358 | AAAAUCUACUAAAAAGUCU | 1498 | AGACUUUUUAGUAGAUUUU |
| 528 | UGAAGACGGGGCUAGAUAU | 1668 | AUAUCUAGCCCCGUCUUCA |
| 539 | CUAGAUAUUGGGAGAAACA | 1679 | UGUUUCUCCCAAUAUCUAG |
| 619 | AAGCAGAACGGUGAAAGUG | 1759 | CACUUUCACCGUUCUGCUU |
| 645 | CAUUGGAUCUUCUCAUUGG | 1785 | CCAAUGAGAAGAUCCAAUG |
| 647 | UUGGAUCUUCUCAUUGGAG | 1787 | CUCCAAUGAGAAGAUCCAA |
| 688 | GACAGUUAUGCGGAUUCUC | 1828 | GAGAAUCCGCAUAACUGUC |
| 745 | AUACAGAGUGGUGUUACGG | 1885 | CCGUAACACCACUCUGUAU |
| 751 | AGUGGUGUUACGGCGGUGG | 1891 | CCACCGCCGUAACACCACU |
| 752 | GUGGUGUUACGGCGGUGGA | 1892 | UCCACCGCCGUAACACCAC |
| 755 | GUGUUACGGCGGUGGAAAA | 1895 | UUUUCCACCGCCGUAACAC |
| 756 | UGUUACGGCGGUGGAAAAG | 1896 | CUUUUCCACCGCCGUAACA |
| 759 | UACGGCGGUGGAAAAGUUU | 1899 | AAACUUUUCCACCGCCGUA |
| 761 | CGGCGGUGGAAAAGUUUAA | 1901 | UUAAACUUUUCCACCGCCG |
| 773 | AGUUUAAAGUUGCCUAAGA | 1913 | UCUUAGGCAACUUUAAACU |

[0320] The siRNAs in subset E have the following characteristics:
[0321] Cross-reactivity: With 19mer in human MTRES1 mRNA, with 17mer/19mer in NHP MTRES1
[0322] Specificity category: For human and NHP: AS2 or better, SS3 or better
[0323] miRNA seeds: AS+SS strand: seed region not conserved in human, mouse, and rat and not present in >4 species. AS+SS strand: seed region not identical to seed region of known human miRNA
[0324] Off-target frequency: <15 human off-targets matched with 2 mismatches by antisense strand
[0325] SNPs: siRNA target sites do not harbor SNPs with a MAF ≥1% (pos. 2-18)

[0326] Subset F includes 54 siRNAs. The siRNAs in subset F include siRNAs from subset A, and are included in Table 7. In some cases, the sense strand of any of the siRNAs of subset F comprises modification pattern 6S (Table 8). In some cases, the antisense strand of any of the siRNAs of subset F comprises modification pattern 7AS (Table 8, “subset G”). In some cases, the sense strand of any of the siRNAs of subset F contains an alternative modification pattern (Table 9, “subset H”). In some cases, the antisense strand of any of the siRNAs of subset F comprises modification pattern 7AS (Table 9). The siRNAs in subset F may comprise any other modification pattern(s). In Table 8 and Table 9, Nf (e.g. Af, Cf, Gf, Tf, or Uf) is a 2′ fluoro-modified nucleoside, n (e.g. a, c, g, t, or u) is a 2′ O-methyl modified nucleoside, and “s” is a phosphorothioate linkage.

TABLE 7
Sequences in siRNA subset F

| SEQ ID | sense strand sequence | SEQ ID | antisense strand sequence |
|---|---|---|---|
| NO: | (5′-3′) | NO: | (5′-3′) |
| 87 | UGGCUAUGGCUAGUGUUAA | 1227 | UUAACACUAGCCAUAGCCA |
| 178 | AUCAUACAAACUCUGUACU | 1318 | AGUACAGAGUUUGUAUGAU |
| 190 | CUGUACUUCCUGGAAUCGA | 1330 | UCGAUUCCAGGAAGUACAG |
| 191 | UGUACUUCCUGGAAUCGAU | 1331 | AUCGAUUCCAGGAAGUACA |
| 192 | GUACUUCCUGGAAUCGAUA | 1332 | UAUCGAUUCCAGGAAGUAC |
| 193 | UACUUCCUGGAAUCGAUAC | 1333 | GUAUCGAUUCCAGGAAGUA |
| 195 | CUUCCUGGAAUCGAUACUU | 1335 | AAGUAUCGAUUCCAGGAAG |
| 199 | CUGGAAUCGAUACUUGUAU | 1339 | AUACAAGUAUCGAUUCCAG |
| 202 | GAAUCGAUACUUGUAUUUU | 1342 | AAAAUACAAGUAUCGAUUC |
| 222 | CUAGUACCAAGUUACGUGC | 1362 | GCACGUAACUUGGUACUAG |
| 223 | UAGUACCAAGUUACGUGCA | 1363 | UGCACGUAACUUGGUACUA |
| 224 | AGUACCAAGUUACGUGCAC | 1364 | GUGCACGUAACUUGGUACU |
| 225 | GUACCAAGUUACGUGCACC | 1365 | GGUGCACGUAACUUGGUAC |
| 226 | UACCAAGUUACGUGCACCA | 1366 | UGGUGCACGUAACUUGGUA |
| 228 | CCAAGUUACGUGCACCAAA | 1368 | UUUGGUGCACGUAACUUGG |
| 229 | CAAGUUACGUGCACCAAAU | 1369 | AUUUGGUGCACGUAACUUG |
| 230 | AAGUUACGUGCACCAAAUU | 1370 | AAUUUGGUGCACGUAACUU |
| 232 | GUUACGUGCACCAAAUUAU | 1372 | AUAAUUUGGUGCACGUAAC |
| 233 | UUACGUGCACCAAAUUAUA | 1373 | UAUAAUUUGGUGCACGUAA |
| 331 | AAGACUCAAAAGUAAUAUA | 1471 | UAUAUUACUUUUGAGUCUU |
| 358 | AAAAUCUACUAAAAAGUCU | 1498 | AGACUUUUUAGUAGAUUUU |
| 362 | UCUACUAAAAAGUCUCUGC | 1502 | GCAGAGACUUUUUAGUAGA |
| 528 | UGAAGACGGGGCUAGAUAU | 1668 | AUAUCUAGCCCCGUCUUCA |
| 539 | CUAGAUAUUGGGAGAAACA | 1679 | UGUUUCUCCCAAUAUCUAG |
| 620 | AGCAGAACGGUGAAAGUGG | 1760 | CCACUUUCACCGUUCUGCU |
| 632 | AAAGUGGGAGAUACAUUGG | 1772 | CCAAUGUAUCUCCCACUUU |
| 633 | AAGUGGGAGAUACAUUGGA | 1773 | UCCAAUGUAUCUCCCACUU |
| 634 | AGUGGGAGAUACAUUGGAU | 1774 | AUCCAAUGUAUCUCCCACU |
| 636 | UGGGAGAUACAUUGGAUCU | 1776 | AGAUCCAAUGUAUCUCCCA |
| 642 | AUACAUUGGAUCUUCUCAU | 1782 | AUGAGAAGAUCCAAUGUAU |
| 645 | CAUUGGAUCUUCUCAUUGG | 1785 | CCAAUGAGAAGAUCCAAUG |
| 646 | AUUGGAUCUUCUCAUUGGA | 1786 | UCCAAUGAGAAGAUCCAAU |
| 647 | UUGGAUCUUCUCAUUGGAG | 1787 | CUCCAAUGAGAAGAUCCAA |
| 648 | UGGAUCUUCUCAUUGGAGA | 1788 | UCUCCAAUGAGAAGAUCCA |
| 650 | GAUCUUCUCAUUGGAGAGG | 1790 | CCUCUCCAAUGAGAAGAUC |
| 654 | UUCUCAUUGGAGAGGAUAA | 1794 | UUAUCCUCUCCAAUGAGAA |
| 656 | CUCAUUGGAGAGGAUAAAG | 1796 | CUUUAUCCUCUCCAAUGAG |
| 687 | AGACAGUUAUGCGGAUUCU | 1827 | AGAAUCCGCAUAACUGUCU |
| 688 | GACAGUUAUGCGGAUUCUC | 1828 | GAGAAUCCGCAUAACUGUC |
| 693 | UUAUGCGGAUUCUCUUGAA | 1833 | UUCAAGAGAAUCCGCAUAA |
| 694 | UAUGCGGAUUCUCUUGAAA | 1834 | UUUCAAGAGAAUCCGCAUA |
| 695 | AUGCGGAUUCUCUUGAAAA | 1835 | UUUUCAAGAGAAUCCGCAU |
| 746 | UACAGAGUGGUGUUACGGC | 1886 | GCCGUAACACCACUCUGUA |
| 755 | GUGUUACGGCGGUGGAAAA | 1895 | UUUUCCACCGCCGUAACAC |
| 756 | UGUUACGGCGGUGGAAAAG | 1896 | CUUUUCCACCGCCGUAACA |
| 757 | GUUACGGCGGUGGAAAAGU | 1897 | ACUUUUCCACCGCCGUAAC |
| 758 | UUACGGCGGUGGAAAAGUU | 1898 | AACUUUUCCACCGCCGUAA |
| 759 | UACGGCGGUGGAAAAGUUU | 1899 | AAACUUUUCCACCGCCGUA |
| 761 | CGGCGGUGGAAAAGUUUAA | 1901 | UUAAACUUUUCCACCGCCG |
| 773 | AGUUUAAAGUUGCCUAAGA | 1913 | UCUUAGGCAACUUUAAACU |
| 775 | UUUAAAGUUGCCUAAGAAG | 1915 | CUUCUUAGGCAACUUUAAA |
| 810 | UGGAUUGCUUUUUAGCAAU | 1950 | AUUGCUAAAAAGCAAUCCA |
| 852 | GAAGGGGUCACCUGAAAAA | 1992 | UUUUUCAGGUGACCCCUUC |
| 887 | AAAUAAAGUUCUCUUAGCG | 2027 | CGCUAAGAGAACUUUAUUU |

TABLE 8
Sequences in siRNA subset G

| SEQ ID | sense strand sequence | SEQ ID | antisense strand sequence |
|---|---|---|---|
| NO: | (5′-3′) | NO: | (5′-3′) |
| 2281 | UfsgsGfcUfaUfgGfcUfaGf | 2335 | usUfsaAfcAfcUfaGfcCfaUf |
| | uGfuUfaAfsusu | | aGfcCfasusu |
| 2282 | AfsusCfaUfaCfaAfaCfuCf | 2336 | usGfsuAfcAfgAfgUfuUfgUf |
| | uGfuAfcAfsusu | | aUfgAfususu |
| 2283 | CfsusGfuAfcUfuCfcUfgGf | 2337 | usCfsgAfuUfcCfaGfgAfaGf |
| | aAfuCfgAfsusu | | uAfcAfgsusu |
| 2284 | UfsgsUfaCfuUfcCfuGfgAf | 2338 | usUfscGfaUfuCfcAfgGfaAf |
| | aUfcGfaAfsusu | | gUfaCfasusu |
| 2285 | GfsusAfcUfuCfcUfgGfaAf | 2339 | usAfsuCfgAfuUfcCfaGfgAf |
| | uCfgAfuAfsusu | | aGfuAfcsusu |
| 2286 | UfsasCfuUfcCfuGfgAfaUf | 2340 | usUfsaUfcGfaUfuCfcAfgGf |
| | CGfaUfaAfsusu | | aAfgUfasusu |
| 2287 | CfsusUfcCfuGfgAfaUfcGf | 2341 | usAfsgUfaUfcGfaUfuCfcAf |
| | aUfaCfuAfsusu | | gGfaAfgsusu |
| 2288 | CfsusGfgAfaUfcGfaUfaCf | 2342 | usUfsaCfaAfgUfaUfcGfaUf |
| | uUfgUfaAfsusu | | uCfcAfgsusu |
| 2289 | GfsasAfuCfgAfuAfcUfuGf | 2343 | usAfsaAfuAfcAfaGfuAfuCf |
| | uAfuUfuAfsusu | | gAfuUfcsusu |
| 2290 | CfsusAfgUfaCfcAfaGfuUf | 2344 | usCfsaCfgUfaAfcUfuGfgUf |
| | aCfgUfgAfsusu | | aCfuAfgsusu |
| 2291 | UfsasGfuAfcCfaAfgUfuAf | 2345 | usGfscAfcGfuAfaCfuUfgGf |
| | cGfuGfcAfsusu | | uAfcUfasusu |
| 2292 | AfsgsUfaCfcAfaGfuUfaCf | 2346 | usUfsgCfaCfgUfaAfcUfuGf |
| | gUfgCfaAfsusu | | gUfaCfususu |
| 2293 | GfsusAfcCfaAfgUfuAfcGf | 2347 | usGfsuGfcAfcGfuAfaCfuUf |
| | uGfcAfcAfsusu | | gGfuAfcsusu |
| 2294 | UfsasCfcAfaGfuUfaCfgUf | 2348 | usGfsgUfgCfaCfgUfaAfcUf |
| | gCfaCfcAfsusu | | uGfgUfasusu |
| 2295 | CfscsAfaGfuUfaCfgUfgCf | 2349 | usUfsuGfgUfgCfaCfgUfaAf |
| | aCfcAfaAfsusu | | cUfuGfgsusu |
| 2296 | CfsasAfgUfuAfcGfuGfcAf | 2350 | usUfsuUfgGfuGfcAfcGfuAf |
| | cCfaAfaAfsusu | | aCfuUfgsusu |
| 2297 | AfsasGfuUfaCfgUfgCfaCf | 2351 | usAfsuUfuGfgUfgCfaCfgUf |
| | cAfaAfuAfsusu | | aAfcUfususu |
| 2298 | GfsusUfaCfgUfgCfaCfcAf | 2352 | usUfsaAfuUfuGfgUfgCfaCf |
| | aAfuUfaAfsusu | | gUfaAfcsusu |
| 2299 | UfsusAfcGfuGfcAfcCfaAf | 2353 | usAfsuAfaUfuUfgGfuGfcAf |
| | aUfuAfuAfsusu | | cGfuAfasusu |
| 2300 | AfsasGfaCfuCfaAfaAfgUf | 2354 | usAfsuAfuUfaCfuUfuUfgAf |
| | aAfuAfuAfsusu | | gUfcUfususu |
| 2301 | AfsasAfaUfcUfaCfuAfaAf | 2355 | usGfsaCfuUfuUfuAfgUfaGf |
| | aAfgUfcAfsusu | | aUfuUfususu |
| 2302 | UfscsUfaCfuAfaAfaAfgUf | 2356 | usCfsaGfaGfaCfuUfuUfuAf |
| | cUfcUfgAfsusu | | gUfaGfasusu |
| 2303 | UfsgsAfaGfaCfgGfgGfcUf | 2357 | usUfsaUfcUfaGfcCfcCfgUf |
| | aGfaUfaAfsusu | | cUfuCfasusu |
| 2304 | CfsusAfgAfuAfuUfgGfgAf | 2358 | usGfsuUfuCfuCfcCfaAfuAf |
| | gAfaAfcAfsusu | | uCfuAfgsusu |
| 2305 | AfsgsCfaGfaAfcGfgUfgAf | 2359 | usCfsaCfuUfuCfaCfcGfuUf |
| | aAfgUfgAfsusu | | cUfgCfususu |
| 2306 | AfsasAfgUfgGfgAfgAfuAf | 2360 | usCfsaAfuGfuAfuCfuCfcCf |
| | cAfuUfgAfsusu | | aCfuUfususu |
| 2307 | AfsasGfuGfgGfaGfaUfaCf | 2361 | usCfscAfaUfgUfaUfcUfcCf |
| | aUfuGfgAfsusu | | cAfcUfususu |
| 2308 | AfsgsUfgGfgAfgAfuAfcAf | 2362 | usUfscCfaAfuGfuAfuCfuCf |
| | uUfgGfaAfsusu | | cCfaCfususu |
| 2309 | UfsgsGfgAfgAfuAfcAfuUf | 2363 | usGfsaUfcCfaAfuGfuAfuCf |
| | gGfaUfcAfsusu | | uCfcCfasusu |
| 2310 | AfsusAfcAfuUfgGfaUfcUf | 2364 | usUfsgAfgAfaGfaUfcCfaAf |
| | uCfuCfaAfsusu | | uGfuAfususu |
| 2311 | CfsasUfuGfgAfuCfuUfcUf | 2365 | usCfsaAfuGfaGfaAfgAfuCf |
| | cAfuUfgAfsusu | | cAfaUfgsusu |
| 2312 | AfsusUfgGfaUfcUfuCfuCf | 2366 | usCfscAfaUfgAfgAfaGfaUf |
| | aUfuGfgAfsusu | | cCfaAfususu |
| 2313 | UfsusGfgAfuCfuUfcUfcAf | 2367 | usUfscCfaAfuGfaGfaAfgAf |
| | uUfgGfaAfsusu | | uCfcAfasusu |
| 2314 | UfsgsGfaUfcUfuCfuCfaUf | 2368 | usCfsuCfcAfaUfgAfgAfaGf |
| | uGfgAfgAfsusu | | aUfcCfasusu |
| 2315 | GfsasUfcUfuCfuCfaUfuGf | 2369 | usCfsuCfuCfcAfaUfgAfgAf |
| | gAfgAfgAfsusu | | aGfaUfcsusu |
| 2316 | UfsusCfuCfaUfuGfgAfgAf | 2370 | usUfsaUfcCfuCfuCfcAfaUf |
| | gGfaUfaAfsusu | | gAfgAfasusu |
| 2317 | CfsusCfaUfuGfgAfgAfgGf | 2371 | usUfsuUfaUfcCfuCfuCfcAf |
| | aUfaAfaAfsusu | | aUfgAfgsusu |
| 2318 | AfsgsAfcAfgUfuAfuGfcGf | 2372 | usGfsaAfuCfcGfcAfuAfaCf |
| | gAfuUfcAfsusu | | uGfuCfususu |
| 2319 | GfsasCfaGfuUfaUfgCfgGf | 2373 | usAfsgAfaUfcCfgCfaUfaAf |
| | aUfuCfuAfsusu | | cUfgUfcsusu |
| 2320 | UfsusAfuGfcGfgAfuUfcUf | 2374 | usUfscAfaGfaGfaAfuCfcGf |
| | cUfuGfaAfsusu | | cAfuAfasusu |
| 2321 | UfsasUfgCfgGfaUfuCfuCf | 2375 | usUfsuCfaAfgAfgAfaUfcCf |
| | uUfgAfaAfsusu | | gCfaUfasusu |
| 2322 | AfsusGfcGfgAfuUfcUfcUf | 2376 | usUfsuUfcAfaGfaGfaAfuCf |
| | uGfaAfaAfsusu | | cGfcAfususu |
| 2323 | UfsasCfaGfaGfuGfgUfgUf | 2377 | usCfscGfuAfaCfaCfcAfcUf |
| | uAfcGfgAfsusu | | cUfgUfasusu |
| 2324 | GfsusGfuUfaCfgGfcGfgUf | 2378 | usUfsuUfcCfaCfcGfcCfgUf |
| | gGfaAfaAfsusu | | aAfcAfcsusu |
| 2325 | UfsgsUfuAfcGfgCfgGfuGf | 2379 | usUfsuUfuCfcAfcCfgCfcGf |
| | gAfaAfaAfsusu | | uAfaCfasusu |
| 2326 | GfsusUfaCfgGfcGfgUfgGf | 2380 | usCfsuUfuUfcCfaCfcGfcCf |
| | aAfaAfgAfsusu | | gUfaAfcsusu |
| 2327 | UfsusAfcGfgCfgGfuGfgAf | 2381 | usAfscUfuUfuCfcAfcCfgCf |
| | aAfaGfuAfsusu | | cGfuAfasusu |
| 2328 | UfsasCfgGfcGfgUfgGfaAf | 2382 | usAfsaCfuUfuUfcCfaCfcGf |
| | aAfgUfuAfsusu | | cCfgUfasusu |
| 2329 | CfsgsGfcGfgUfgGfaAfaAf | 2383 | usUfsaAfaCfuUfuUfcCfaCf |
| | gUfuUfaAfsusu | | cGfcCfgsusu |
| 2330 | AfsgsUfuUfaAfaGfuUfgCf | 2384 | usCfsuUfaGfgCfaAfcUfuUf |
| | cUfaAfgAfsusu | | aAfaCfususu |
| 2331 | UfsusUfaAfaGfuUfgCfcUf | 2385 | usUfsuCfuUfaGfgCfaAfcUf |
| | aAfgAfaAfsusu | | uUfaAfasusu |
| 2332 | UfsgsGfaUfuGfcUfuUfuUf | 2386 | usUfsuGfcUfaAfaAfaGfcAf |
| | aGfcAfaAfsusu | | aUfcCfasusu |
| 2333 | GfsasAfgGfgGfuCfaCfcUf | 2387 | usUfsuUfuCfaGfgUfgAfcCf |
| | gAfaAfaAfsusu | | cCfuUfcsusu |
| 2334 | AfsasAfuAfaAfgUfuCfuCf | 2388 | usGfscUfaAfgAfgAfaCfuUf |
| | uUfaGfcAfsusu | | uAfuUfususu |

TABLE 9
Sequences in siRNA subset H

| siRNA | SEQ ID | sense strand sequence | SEQ ID | antisense strand sequence |
|---|---|---|---|---|
| Name | NO: | (5′-3′) | NO: | (5′-3′) |
| ETD01220 | 2389 | usgsgcuAfuGfGfcuagu | 2335 | usUfsaAfcAfcUfaGfcCfaUfa |
| | | guuaasusu | | GfcCfasusu |
| ETD01221 | 2390 | asuscauAfcAfAfacucu | 2336 | usGfsuAfcAfgAfgUfuUfgUfa |
| | | guacasusu | | UfgAfususu |
| ETD01222 | 2391 | csusguaCfuuCfCfugga | 2337 | usCfsgAfuUfcCfaGfgAfaGfu |
| | | aucgasusu | | AfcAfgsusu |
| ETD01223 | 2392 | usgsuaCfuuCfCfuggaa | 2338 | usUfscGfaUfuCfcAfgGfaAfg |
| | | ucgaasusu | | UfaCfasusu |
| ETD01224 | 2393 | gsusacUfUfccUfggaau | 2339 | usAfsuCfgAfuUfcCfaGfgAfa |
| | | cgauasusu | | GfuAfcsusu |
| ETD01225 | 2394 | usascuuccuGfGfaaucg | 2340 | usUfsaUfcGfaUfuCfcAfgGfa |
| | | auaasusu | | AfgUfasusu |
| ETD01226 | 2395 | csusuccuGfGfAfAfucg | 2341 | usAfsgUfaUfcGfaUfuCfcAfg |
| | | auacuasusu | | GfaAfgsusu |
| ETD01227 | 2396 | csusggAfAfucGfAfuac | 2342 | usUfsaCfaAfgUfaUfcGfaUfu |
| | | uuguaasusu | | CfcAfgsusu |
| ETD01228 | 2397 | gsasaucGfAfuAfcuugu | 2343 | usAfsaAfuAfcAfaGfuAfuCfg |
| | | auuuasusu | | AfuUfcsusu |
| ETD01229 | 2398 | csusaguAfccAfAfguua | 2344 | usCfsaCfgUfaAfcUfuGfgUfa |
| | | cgugasusu | | CfuAfgsusu |
| ETD01230 | 2399 | usasguAfccAfAfguuac | 2345 | usGfscAfcGfuAfaCfuUfgGfu |
| | | gugcasusu | | AfcUfasusu |
| ETD01231 | 2400 | asgsuaccAfaGfuuacgu | 2346 | usUfsgCfaCfgUfaAfcUfuGfg |
| | | gcaasusu | | UfaCfususu |
| ETD01232 | 2401 | gsusacCfaagUfUfacgu | 2347 | usGfsuGfcAfcGfuAfaCfuUfg |
| | | gcacasusu | | GfuAfcsusu |
| ETD01233 | 2402 | usasccaagUfUfaCfgug | 2348 | usGfsgUfgCfaCfgUfaAfcUfu |
| | | caccasusu | | GfgUfasusu |
| ETD01234 | 2403 | cscsaagUfUfaCfgUfgc | 2349 | usUfsuGfgUfgCfaCfgUfaAfc |
| | | accaaasusu | | UfuGfgsusu |
| ETD01235 | 2404 | csasaguuAfcGfuGfcac | 2350 | usUfsuUfgGfuGfcAfcGfuAfa |
| | | caaaasusu | | CfuUfgsusu |
| ETD01236 | 2405 | asasguUfaCfgUfgCfac | 2351 | usAfsuUfuGfgUfgCfaCfgUfa |
| | | caaauasusu | | AfcUfususu |
| ETD01237 | 2406 | gsusuaCfgugCfaCfcaa | 2352 | usUfsaAfuUfuGfgUfgCfaCfg |
| | | auuaasusu | | UfaAfcsusu |
| ETD01238 | 2407 | ususacGfuGfcAfccaaa | 2353 | usAfsuAfaUfuUfgGfuGfcAfc |
| | | uuauasusu | | GfuAfasusu |
| ETD01239 | 2408 | asasgacucAfAfAfAfgu | 2354 | usAfsuAfuUfaCfuUfuUfgAfg |
| | | aauauasusu | | UfcUfususu |
| ETD01240 | 2409 | asasaaUfCfuaCfUfaaa | 2355 | usGfsaCfuUfuUfuAfgUfaGfa |
| | | aagucasusu | | UfuUfususu |
| ETD01241 | 2410 | uscsuacuAfAfAfAfAfg | 2356 | usCfsaGfaGfaCfuUfuUfuAfg |
| | | ucucugasusu | | UfaGfasusu |
| ETD01242 | 2411 | usgsaaGfacGfGfGfGfc | 2357 | usUfsaUfcUfaGfcCfcCfgUfc |
| | | uagauaasusu | | UfuCfasusu |
| ETD01243 | 2412 | csusagaUfaUfUfgggag | 2358 | usGfsuUfuCfuCfcCfaAfuAfu |
| | | aaacasusu | | CfuAfgsusu |
| ETD01244 | 2413 | asgscaGfaacGfGfugaa | 2359 | usCfsaCfuUfuCfaCfcGfuUfc |
| | | agugasusu | | UfgCfususu |
| ETD01245 | 2414 | asasaguGfggAfgAfuac | 2360 | usCfsaAfuGfuAfuCfuCfcCfa |
| | | auugasusu | | CfuUfususu |
| ETD01246 | 2415 | asasguGfgGfaGfauaca | 2361 | usCfscAfaUfgUfaUfcUfcCfc |
| | | uuggasusu | | AfcUfususu |
| ETD01247 | 2416 | asgsugggAfgAfuAfcau | 2362 | usUfscCfaAfuGfuAfuCfuCfc |
| | | uggaasusu | | CfaCfususu |
| ETD01248 | 2417 | usgsggAfgAfuAfcAfuu | 2363 | usGfsaUfcCfaAfuGfuAfuCfu |
| | | ggaucasusu | | CfcCfasusu |
| ETD01249 | 2418 | asusacAfuuGfGfaucuu | 2364 | usUfsgAfgAfaGfaUfcCfaAfu |
| | | cucaasusu | | GfuAfususu |
| ETD01250 | 2419 | csasuuggaUfCfUfUfcu | 2365 | usCfsaAfuGfaGfaAfgAfuCfc |
| | | cauugasusu | | AfaUfgsusu |
| ETD01251 | 2420 | asusuggaUfcUfUfcuca | 2366 | usCfscAfaUfgAfgAfaGfaUfc |
| | | uuggasusu | | CfaAfususu |
| ETD01252 | 2421 | ususggaUfcUfUfcUfca | 2367 | usUfscCfaAfuGfaGfaAfgAfu |
| | | uuggaasusu | | CfcAfasusu |
| ETD01253 | 2422 | usgsgauCfuuCfuCfauu | 2368 | usCfsuCfcAfaUfgAfgAfaGfa |
| | | ggagasusu | | UfcCfasusu |
| ETD01254 | 2423 | gsasucUfuCfuCfauugg | 2369 | usCfsuCfuCfcAfaUfgAfgAfa |
| | | agagasusu | | GfaUfcsusu |
| ETD01255 | 2424 | ususcucAfuuGfGfagag | 2370 | usUfsaUfcCfuCfuCfcAfaUfg |
| | | gauaasusu | | AfgAfasusu |
| ETD01256 | 2425 | csuscauuGfGfAfGfAfg | 2371 | usUfsuUfaUfcCfuCfuCfcAfa |
| | | gauaaaasusu | | UfgAfgsusu |
| ETD01257 | 2426 | asgsacAfGfuuAfuGfcg | 2372 | usGfsaAfuCfcGfcAfuAfaCfu |
| | | gauucasusu | | GfuCfususu |
| ETD01258 | 2427 | gsascagUfUfaUfgcgga | 2373 | usAfsgAfaUfcCfgCfaUfaAfc |
| | | uucuasusu | | UfgUfcsusu |
| ETD01259 | 2428 | ususauGfcGfgAfuucuc | 2374 | usUfscAfaGfaGfaAfuCfcGfc |
| | | uugaasusu | | AfuAfasusu |
| ETD01260 | 2429 | usasugCfggaUfUfcucu | 2375 | usUfsuCfaAfgAfgAfaUfcCfg |
| | | ugaaasusu | | CfaUfasusu |
| ETD01261 | 2430 | asusgcggaUfUfcUfcuu | 2376 | usUfsuUfcAfaGfaGfaAfuCfc |
| | | gaaaasusu | | GfcAfususu |
| ETD01262 | 2431 | usascaGfaGfuGfGfugu | 2377 | usCfscGfuAfaCfaCfcAfcUfc |
| | | uacggasusu | | UfgUfasusu |
| ETD01263 | 2432 | gsusguuacGfGfcGfgug | 2378 | usUfsuUfcCfaCfcGfcCfgUfa |
| | | gaaaasusu | | AfcAfcsusu |
| ETD01264 | 2433 | usgsuuaCfggCfggugga | 2379 | usUfsuUfuCfcAfcCfgCfcGfu |
| | | aaaasusu | | AfaCfasusu |
| ETD01265 | 2434 | gsusuacGfGfcGfGfugg | 2380 | usCfsuUfuUfcCfaCfcGfcCfg |
| | | aaaagasusu | | UfaAfcsusu |
| ETD01266 | 2435 | ususacGfGfcGfGfuGfg | 2381 | usAfscUfuUfuCfcAfcCfgCfc |
| | | aaaaguasusu | | GfuAfasusu |
| ETD01267 | 2436 | usascggCfggUfggaaaa | 2382 | usAfsaCfuUfuUfcCfaCfcGfc |
| | | guuasusu | | CfgUfasusu |
| ETD01268 | 2437 | csgsgcGfGfuGfGfaaaa | 2383 | usUfsaAfaCfuUfuUfcCfaCfc |
| | | guuuaasusu | | GfcCfgsusu |
| ETD01269 | 2438 | asgsuuuAfAfAfGfuugc | 2384 | usCfsuUfaGfgCfaAfcUfuUfa |
| | | cuaagasusu | | AfaCfususu |
| ETD01270 | 2439 | ususuaaagUfUfgCfcua | 2385 | usUfsuCfuUfaGfgCfaAfcUfu |
| | | agaaasusu | | UfaAfasusu |
| ETD01271 | 2440 | usgsgaUfUfgcUfuUfuu | 2386 | usUfsuGfcUfaAfaAfaGfcAfa |
| | | agcaaasusu | | UfcCfasusu |
| ETD01272 | 2441 | gsasaggggUfCfaCfcug | 2387 | usUfsuUfuCfaGfgUfgAfcCfc |
| | | aaaaasusu | | CfuUfcsusu |
| ETD01273 | 2334 | AfsasAfuAfaAfgUfuCf | 2388 | usGfscUfaAfgAfgAfaCfuUfu |
| | | uCfuUfaGfcAfsusu | | AfuUfususu |

[0327] Any siRNA among any of subsets A-H may comprise any modification pattern described herein. If a sequence is a different number of nucleotides in length than a modification pattern, the modification pattern may still be used with the appropriate number of additional nucleotides added 5′ or 3′ to match the number of nucleotides in the modification pattern. For example, if a sense or antisense strand of the siRNA among any of subsets A-F comprises 19 nucleotides, and a modification pattern comprises 21 nucleotides, UU may be added onto the 5′ end of the sense or antisense strand.

### Example 3: Screening MTRES1 siRNAs for Activity in Human Cells in Culture

[0328] Chemically modified MTRES1 siRNAs in Table 9 were assayed for MTRES1 mRNA knockdown activity in cells in culture. SK-LMS-1 cells (ATCCR HTB-88) were seeded in 96-well tissue culture plates at a cell density of 7,500 cells per well in EMEM (ATCC Catalog No. 30-2003) supplemented with 10% fetal bovine serum and incubated overnight in a water-jacketed, humidified incubator at 37° C. in an atmosphere composed of air plus 500 carbon dioxide. These siRNAs were derived from sequences in siRNA subset F, and were cross reactive for human and non-human primate. The MTRES1 siRNAs were individually transfected into SK-LMS-1 cells in duplicate wells at 10 nM and 1 nM final concentration using 0.3 μL Lipofectamine RNAiMax (Fisher) per well. Silencer Select Negative Control #1 (ThermoFisher, Catalog #4390843) was transfected at 10 nM and 1 nM final concentration as a control. Silencer Select human MTRES1 (ThermoFisher, Catalog #4427037, ID: s27762) was transfected at 10 nM and 1 nM final concentration and used as a positive control. After incubation for 48 hours at 37° C., total RNA was harvested from each well and cDNA prepared using TaqMan® Fast Advanced Cells-to-CT™ Kit (ThermoFisher, Catalog #A35374) according to the manufacturer's instructions. The level of MTRES1 mRNA from each well was measured in triplicate by real-time qPCR on a QuantStudio™ 6 Pro Real-Time PCR System using TaqMan Gene Expression Assay for human MTRES1 (ThermoFisher, assay #Hs00360684_Ml). The level of PPIA mRNA was measured using TaqMan Gene Expression Assay (ThermoFisher, assay #Hs99999904_ml) and used to determine relative MTRES1 mRNA levels in each well using the delta-delta Ct method. All data was normalized to relative MTRES1 mRNA levels in untreated SK-LMS-1 cells. The results are shown in Table 10. The siRNAs ETD01228, ETD01270, ETD01251, ETD01235, ETD01249, ETD01258, ETD01268, ETD01273, ETD01263, ETD01240, ETD01223, ETD01262, ETD01239, ETD01242, ETD01272, ETD01220, ETD01261, ETD01243, ETD01269, ETD01256, ETD01241, ETD01238, ETD01247 and ETD01266 reduced MTRES1 levels by greater than 50% when transfected at 10 nM.

TABLE 10
Knockdown Activity of MTRES1-Specific siRNAs
at 10 nM and 1 nM in Human SK-LMS-1 Cells

| | Sense | Antisense | | |
|---|---|---|---|---|
| | Strand SEQ | Strand SEQ | Relative MTRES1 | |
| siRNA name | ID NO: | ID NO: | mRNA Level | |
| Untreated Cells | — | — | 1.00 | |
| | | | 10 nM | 1 nM |
| | | | siRNA | siRNA |
| Negative | — | — | 0.93 | 1.34 |
| Control siRNA | | | | |
| Positive | — | — | 0.39 | 0.80 |
| Control siRNA | | | | |
| ETD01220 | 2389 | 2335 | 0.34 | 0.87 |
| ETD01221 | 2390 | 2336 | 0.73 | 1.24 |
| ETD01222 | 2391 | 2337 | 1.03 | 1.18 |
| ETD01223 | 2392 | 2338 | 0.39 | 0.57 |
| ETD01224 | 2393 | 2339 | 0.62 | 0.86 |
| ETD01225 | 2394 | 2340 | 1.13 | 1.10 |
| ETD01226 | 2395 | 2341 | 0.50 | 0.69 |
| ETD01227 | 2396 | 2342 | 1.10 | 1.21 |
| ETD01228 | 2397 | 2343 | 0.50 | 0.68 |
| ETD01229 | 2398 | 2344 | 0.52 | 0.96 |
| ETD01230 | 2399 | 2345 | 1.01 | 1.14 |
| ETD01231 | 2400 | 2346 | 0.52 | 1.00 |
| ETD01232 | 2401 | 2347 | 0.78 | 1.01 |
| ETD01233 | 2402 | 2348 | 0.79 | 1.11 |
| ETD01234 | 2403 | 2349 | 0.81 | 0.92 |
| ETD01235 | 2404 | 2350 | 0.44 | 0.75 |
| ETD01236 | 2405 | 2351 | 0.87 | 1.04 |
| ETD01237 | 2406 | 2352 | 0.57 | 0.83 |
| ETD01238 | 2407 | 2353 | 0.28 | 0.49 |
| ETD01239 | 2408 | 2354 | 0.38 | 0.76 |
| ETD01240 | 2409 | 2355 | 0.41 | 0.81 |
| ETD01241 | 2410 | 2356 | 0.29 | 0.59 |
| ETD01242 | 2411 | 2357 | 0.37 | 0.61 |
| ETD01243 | 2412 | 2358 | 0.32 | 0.83 |
| ETD01244 | 2413 | 2359 | 1.00 | 1.15 |
| ETD01245 | 2414 | 2360 | 0.98 | 1.04 |
| ETD01246 | 2415 | 2361 | 0.85 | 1.05 |
| ETD01247 | 2416 | 2362 | 0.26 | 0.52 |
| ETD01248 | 2417 | 2363 | 0.92 | 1.04 |
| ETD01249 | 2418 | 2364 | 0.44 | 0.78 |
| ETD01250 | 2419 | 2365 | 1.04 | 1.10 |
| ETD01251 | 2420 | 2366 | 0.47 | 0.94 |
| ETD01252 | 2421 | 2367 | 0.83 | 1.17 |
| ETD01253 | 2422 | 2368 | 0.87 | 1.04 |
| ETD01254 | 2423 | 2369 | 0.92 | 1.02 |
| ETD01255 | 2424 | 2370 | 0.84 | 1.03 |
| ETD01256 | 2425 | 2371 | 0.29 | 0.57 |
| ETD01257 | 2426 | 2372 | 0.75 | 1.00 |
| ETD01258 | 2427 | 2373 | 0.44 | 0.93 |
| ETD01259 | 2428 | 2374 | 0.55 | 1.00 |
| ETD01260 | 2429 | 2375 | 0.66 | 1.33 |
| ETD01261 | 2430 | 2376 | 0.33 | 0.53 |
| ETD01262 | 2431 | 2377 | 0.39 | 0.92 |
| ETD01263 | 2432 | 2378 | 0.42 | 0.76 |
| ETD01264 | 2433 | 2379 | 1.00 | 1.28 |
| ETD01265 | 2434 | 2380 | 1.00 | 0.94 |
| ETD01266 | 2435 | 2381 | 0.24 | 0.36 |
| ETD01267 | 2436 | 2382 | 0.90 | 1.14 |
| ETD01268 | 2437 | 2383 | 0.44 | 1.06 |
| ETD01269 | 2438 | 2384 | 0.32 | 0.90 |
| ETD01270 | 2439 | 2385 | 0.50 | 0.91 |
| ETD01271 | 2440 | 2386 | 0.52 | 1.15 |
| ETD01272 | 2441 | 2387 | 0.35 | 0.90 |
| ETD01273 | 2442 | 2388 | 0.44 | 1.24 |

### Example 4: Determining the IC50 of MTRES1 siRNAs

[0329] The IC50 values for knockdown of MNTRES1 mRNA by select MTRES1 siRNAs will be determined in SK-LMS-1 (ATCC® HTB-88) cells. The siRNAs will be assayed individually at 30 nM, 10 nM, 3 nM, 1 nM and 0.3 nM, or 3 nM, 1 nM, 0.3 nM, 0.1 nM and 0.03 nM, or 30 nM, 10 nM, 3 nM, 1 nM, 0.3 nM, 0.1 nM and 0.03 nM. The SK-LMS-1 cells will be seeded in 96-well tissue culture plates at a cell density of 7,500 cells per well in EMEM (ATCC Catalog No. 30-2003) supplemented with 10% fetal bovine serum and incubated overnight in a water-jacketed, humidified incubator at 37° C. in an atmosphere composed of air plus 5% carbon dioxide. The MTRES1 siRNAs will be individually transfected into SK-LMS-1 cells in triplicate wells using 0.3 μL Lipofectamine RNAiMax (Fisher) per well. After incubation for 48 hours at 37° C., total RNA will be harvested from each well and cDNA prepared using TaqMan® Fast Advanced Cells-to-CT™ Kit (ThermoFisher, Catalog #A35374) according to the manufacturer's instructions. The level of MTRES1 mRNA from each well will be measured in triplicate by real-time qPCR on a QuantStudio™ 6 Pro Real-Time PCR System using TaqMan Gene Expression Assay for human MTRES1 (ThermoFisher, assay #Hs01568158_ml). The level of PPIA mRNA will be measured using TaqMan Gene Expression Assay (ThermoFisher, assay #Hs99999904 ml) and used to determine relative MTRES1 mRNA levels in each well using the delta-delta Ct method. All data will be normalized to relative MTRES1 mRNA levels in untreated SK-LMS-1 cells. Curve fit will be accomplish using the [inhibitor] vs. response (three parameters) function in GraphPad Prism software.

### Example 5: siRNA-Mediated Knockdown of MTRES1 in HCN-2 Cells

[0330] siRNAs targeted to MTRES1 mRNA that downregulate levels of MTRES1 mRNA may lead to a decrease in mRNA abundance of mitochondrially expressed NADH-ubiquinone oxidoreductase chain 5 protein (ND5), NADH-ubiquinone oxidoreductase chain 6 protein (ND6), cytochrome b (CYTB), and mitochondrially encoded 12S ribosomal RNA (12S rRNA), when administered to the cultured human neuronal cell line HCN-2 under conditions of ethidium bromide induced mitochondrial stress.

[0331] On Day 0, HCN-2 cells are to be seeded at 150,000 cells/mL into a Falcon 24-well tissue culture plate (ThermoFisher Cat. No. 353047) at 0.5 mL per well.

[0332] On Day 1, cells are treated with ethidium bromide (100 ng/ml), a well-established mitochondrial DNA replication/transcription inhibitor and stressor. Also on Day 1, MTRES1 siRNA and negative control siRNA master mixes are prepared. The MTRES1 siRNA master mix contains 350 μL of Opti-MEM (ThermoFisher Cat. No. 4427037-s1288 Lot No. AS02B02D) and 3.5 μL of a mixture of two MTRES1 siRNAs (10 μM stock). The negative control siRNA master mix contains 350 μL of Opti-MEM and 3.5 μL of negative control siRNA (ThermoFisher Cat. No. 4390843, 10 μM stock). Next, 3 μL of TransIT-X2 (Mirus Cat. No. MIR-6000) is added to each master mix. The mixes are incubated for 15 minutes to allow transfection complexes to form, then 51 μL of the appropriate master mix+TransIT-X2 is added to duplicate wells of HCN-2 cells with a final siRNA concentration of 10 nM.

[0333] On Day 3, 48 hours post transfection, duplicate wells are lysed using the Cells-to-Ct kit according to the manufacturer's protocol (ThermoFisher Cat. No. 4399002) or protein lysis buffer containing protease and phosphatase inhibitors. For the Cells-to-Ct, cells are washed with 50 μL using cold 1×PBS and lysed by adding 49.5 μL of Lysis Solution and 0.5 μL DNase I per well and pipetting up and down 5 times and incubating for 5 minutes at room temperature. Stop Solution (5 μL/well) is added to each well and mixed by pipetting up and down five times and incubating at room temperature for 2 minutes. The reverse transcriptase reaction is performed using 22.5 μL of the lysate according to the manufacturer's protocol. Samples are stored at −80° C. until real-time qPCR is performed in triplicate using TaqMan Gene Expression Assays (Applied Biosystems FAM/MTRES1, FAM/ND5, FAM/ND6, FAM/CYTB and FAM/12srRNA and using a BioRad CFX96 Cat. No. 1855195).

[0334] A decrease in MTRES1 mRNA expression in the HCN-2 cells is expected after transfection with the MTRES1 siRNAs compared to MTRES1 mRNA levels in HCN-2 cells transfected with the non-specific control siRNA 48 hours after transfection. There is an expected decrease in abundance of mitochondrial expressed genes ND5, ND6, CYTB and 12s rRNA mRNA. These results will show that the MTRES1 siRNAs elicit knockdown of MTRES1 mRNA in HCN-2 cells, and that the decrease in MTRES1 expression is correlated with a decrease in abundance of mitochondrial expressed genes ND5, ND6, CYTB and 12s rRNA mRNA.

### Example 6: ASO-Mediated Knockdown of MTRES1 in HCN-2 Cells

[0335] ASOs targeted to MTRES1 mRNA that downregulate levels of MTRES1 mRNA may lead to a decrease in mRNA abundance of mitochondrial expressed ND5, ND6, CYTB and 12s rRNA, when administered to the cultured human neuronal cell line HCN-2 under conditions of ethidium bromide induced mitochondrial stress.

[0336] On Day 0, HCN-2 cells are to be seeded at 150,000 cells/mL into a Falcon 24-well tissue culture plate (ThermoFisher Cat. No. 353047) at 0.5 mL per well.

[0337] On Day 1, cells are treated with ethidium bromide (100 ng/ml), a well-established mitochondrial DNA replication/transcription inhibitor and stressor. Also on Day 1, MTRES1 AS O and negative control ASO master mixes are prepared. The MTRES1 ASO master mix contains 350 μL of Opti-MEM (ThermoFisher Cat. No. 4427037-s1288 Lot No. AS02B02D) and 3.5 μL of a mixture of two MTRES1 ASOs (10 μM stock). The negative control ASO master mix contains 350 μL of Opti-MEM and 3.5 μL of negative control ASO (ThermoFisher Cat. No. 4390843, 10 μM stock). Next, 3 μL of TransIT-X2 (Mirus Cat. No. MIR-6000) is added to each master mix. The mixes are incubated for 15 minutes to allow transfection complexes to form, then 51 μL of the appropriate master mix+TransIT-X2 is added to duplicate wells of HCN-2 cells with a final ASO concentration of 10 nM.

[0338] On Day 3, 48 hours post transfection, duplicate wells are lysed using the Cells-to-Ct kit according to the manufacturer's protocol (ThermoFisher Cat. No. 4399002) or protein lysis buffer containing protease and phosphatase inhibitors. For the Cells-to-Ct, cells are washed with 50 μL using cold 1×PBS and lysed by adding 49.5 μL of Lysis Solution and 0.5 μL DNase I per well and pipetting up and down 5 times and incubating for 5 minutes at room temperature. Stop Solution (5 μL/well) is added to each well and mixed by pipetting up and down five times and incubating at room temperature for 2 minutes. The reverse transcriptase reaction is performed using 22.5 μL of the lysate according to the manufacturer's protocol. Samples are stored at −80° C. until real-time qPCR is performed in triplicate using TaqMan Gene Expression Assays (Applied Biosystems FAM/MTRES1, FAM/ND5, FAM/ND6, FAM/CYTB and FAM/12srRNA and using a BioRad CFX96 Cat. No. 1855195).

[0339] A decrease in MTRES1 mRNA expression in the HCN-2 cells is expected after transfection with the MTRES1 ASOs compared to MTRES1 mRNA levels in HCN-2 cells transfected with the non-specific control ASO 48 hours after transfection. There is an expected decrease in abundance of mitochondrial expressed genes ND5, ND6, CYTB and 12s rRNA mRNA. These results will show that the MTRES1 ASOs elicit knockdown of MTRES1 mRNA in HCN-2 cells, and that the decrease in MTRES1 expression is correlated with a decrease in abundance of mitochondrial expressed genes ND5, ND6, CYTB and 12s rRNA mRNA.

### Example 7: Inhibition of MTRES1 in a Mouse Model for Alzheimer's Disease Using MTRES1 siRNAs or ASOs

[0340] In this experiment, a mouse model of Alzheimer's Disease (AD) will be used to evaluate effects of siRNA or ASO inhibition of MTRES1. The model includes Tg2576 mice which express human amyloid beta precursor protein (APP) and presenilin-1 (PSEN1) transgenes with five AD-linked mutations. Cognitive function is measured using a forced swimming test (FST).

[0341] Seven-month-old mice are divided into four groups: Group 1—a group treated with non-targeting control siRNA, Group 2—a group treated with non-targeting control ASO, Group 3—a group treated with MTRES1 siRNA1, Group 4—a group treated with MTRES1 ASO1. Each group contains eight rats (4 males, 4 females), Group 5—a group treated with vehicle.

[0342] Administration of siRNA, ASO or vehicle is achieved with a 10 μL intracerebroventricular (ICV) injection of siRNA or ASO resuspended in PBS at concentration of 10 μM. On Study Day 0, Group 1 mice will be receive non-targeting control siRNA by ICV, Group 2 mice receive non-targeting control ASO by ICV, Group 3 mice will receive siRNA1 targeting mouse MTRES1 by ICV, Group 4 mice will receive ASO1 targeting mouse MTRES1 by ICV, and Group 5 mice will receive vehicle by ICV. Every other week thereafter animals from each group will be dosed for a total of 4 injections. The behavioral tests are performed 24 hrs after the final injection.

[0343] To rule out nonspecific motor effects that could influence the FST results, the potential effect of siRNA or ASO treatment on locomotor activity is assessed. Mice are evaluated using the openfield paradigm (44×44×40 cm) in a sound-attenuated room. The total distance (cm) traveled by each mouse is recorded for 5 min by a video surveillance system (SMART; Panlab SL, Barcelona, Spain) and is used to quantify activity levels. The floor of the open-field apparatus is cleaned with 10% ethanol between tests.

[0344] The FST includes a behavioral test useful for screening potential drugs that influence cognition and assessing other manipulations that are expected to affect cognitive related behaviors. On the first day, mice are placed individually in the water and allowed to swim for 15 min. The next day, mice are placed again in the water to observe the duration of immobility for 6 min using a camera. Following a 1-min session of acclimation to the apparatus, all behaviors are recorded for 5 min by a video surveillance system (SMART 2.5.21; Panlab SL). Immobility is defined as motionless floating in the water, only allowing movements necessary for the animal to keep its head above the water. The total immobility time in the FST is recorded as an index of cognitive ability.

[0345] Twenty four hours after the behavioral assessment, the mice are sacrificed by cervical dislocation following an intraperitoneal injection of 0.3 ml Nembutal (5 mg/ml) (Sigma Cat. No. 1507002). Brain and spinal cord tissues are removed and placed in RNAlater for mRNA isolation.

[0346] mRNA is isolated from tissue placed in RNAlater solution using the PureLink kit according to the manufacturer's protocol (ThermoFisher Cat. No. 12183020). The reverse transcriptase reaction is performed according to the manufacturer's protocol. Samples are stored at −80° C. until real-time qPCR was performed in triplicate using TaqMan Gene Expression Assays (Applied Biosystems FAM/MTRES1 using a BioRad CFX96 Cat. No. 1855195). A decrease in MTRES1 mRNA expression in the cortical tissue from mice dosed with the MTRES1 siRNA1 or ASO1 is expected compared to MTRES1 mRNA levels in the cortical tissue from mice dosed with the non-specific controls. There is an expected decrease in the total immobility time in the FST in mice that receive the MTRES1 siRNA or ASO compared to the total immobility time in the FST in mice that receive the non-specific control along with no change between treatment groups in the locomotor activity test. These results will show that the MTRES1 siRNA or ASO elicit knockdown of MTRES1 mRNA in cortical tissue, and that the decrease in MTRES1 expression is correlated with a decrease in total immobility time in the FST along with no change in locomotor activity. These results will indicate that administration of an oligonucleotide targeting MTRES1 to a mammalian subject may be used to treat neurological disorder that includes cognitive decline.

### Example 8: Screening siRNAs Targeting Human and Mouse MTRES1 in Mice

[0347] Several siRNAs designed to be cross-reactive with human and mouse MTRES1 mRNA were tested for activity in mice. The siRNAs were attached to the GalNAc ligand ETL1. The siRNA sequences are shown in Table 11A, where Nf is a 2′ fluoro-modified nucleoside, n is a 2′ O-methyl modified nucleoside, and “s” is a phosphorothioate linkage.

[0348] Six to eight week old female mice (strain ICR, n=3) were given a subcutaneous injection on Day 0 of a single 200 ug dose of a GalNAc-conjugated siRNA or PBS as vehicle control.

[0349] Mice were euthanized on Day 14 after injection and a liver sample from each was collected and placed in RNAlater (ThermoFisher Catalog #AM7020) until processing. Total liver RNA was prepared by homogenizing the liver tissue in homogenization buffer (Maxwell RSC simplyRNA Tissue Kit) using a Percellys 24 tissue homogenizer (Bertin Instruments) set at 5000 rpm for two 10 second cycles. Total RNA from the lysate was purified on a Maxwell RSC 48 platform (Promega Corporation) according to the manufacturer's recommendations. Preparation of cDNA was performed using Quanta qScript cDNA SuperMix (VWR, Catalog #95048-500) according to the manufacturer's instructions. The relative levels of liver MTRES1 mRNA were assessed by RT-qPCR in triplicate on a QuantStudio™ 6 Pro Real-Time PCR System using TaqMan assays for mouseMTRES1 (ThermoFisher, assay #Mm01229834 ml) and the mouse housekeeping gene PPIA (ThermoFisher, assay #Mm02342430_g1) and PerfeCTa® qPCR FastMix®, Low ROX™ (VWR, Catalog #101419-222). Data were normalized to the mean MTRES1 mRNA level in animals receiving PBS. Results are shown in Table 12. Mice injected with ETD01506, ETD01507, ETD01508, and ETD01509 had substantially lower levels in mean liver MTRES1 mRNA on Day 14 relative to mice receiving PBS.

TABLE 11A
Description of Example siRNAs with Sequences

| | Sense | | Antisense | |
|---|---|---|---|---|
| | Strand | Sense Strand Sequence | Strand | |
| siRNA | SEQ ID | (5′-3′) | SEQ ID | Antisense Strand Sequence |
| Name | NO: | with GalNAc moiety | NO: | (5′-3′) |
| ETD01506 | 2463 | [ETL1]UfscsgaUfaCfuUfgUfaUfuU | 2467 | usGfsaAfaAfaUfaCfaAfgUfaUfcG |
| | | fuUfcasusu | | fasusu |
| ETD01507 | 2464 | [ETL1]csusAfcAfaAfgGfuGfaAfcu | 2468 | usCfsugaGfuUfcaccuUfuGfuagsus |
| | | cAfgAfsusu | | u |
| ETD01508 | 2465 | [ETL1]AfsusGfgAfaGfaAfaAfgcaG | 2469 | usGfsuucUfgCfuuuucUfuCfcausus |
| | | faAfcAfsusu | | u |
| ETD01509 | 2466 | [ETL1]csusuucuAfcAfaAfgGfuGfa | 2470 | usGfsuUfcAfcCfuUfuGfuAfgAfa |
| | | AfcAfsusu | | Afgsusu |

TABLE 11B
Example siRNA Base Sequences

| siRNA | SEQ ID | Sense Strand Base Sequence | SEQ ID | Antisense Strand Base Sequence |
|---|---|---|---|---|
| Name | NO: | (5′-3′) | NO: | (5′-3′) |
| ETD01506 | 2550 | UCGAUACUUGUAUUUUUCAUU | 2612 | UGAAAAAUACAAGUAUCGAUU |
| ETD01507 | 2551 | CUACAAAGGUGAACUCAGAUU | 2613 | UCUGAGUUCACCUUUGUAGUU |
| ETD01508 | 2552 | AUGGAAGAAAAGCAGAACAUU | 2614 | UGUUCUGCUUUUCUUCCAUUU |
| ETD01509 | 2553 | CUUUCUACAAAGGUGAACAUU | 2615 | UGUUCACCUUUGUAGAAAGUU |
| | | Sense Strand Base Sequence | | Antisense Strand Base Sequence |
| siRNA | SEQ ID | (5′-3′), | SEQ ID | (5′-3′), |
| Name | NO: | without 3′ overhangs | NO: | without 3′ overhangs |
| ETD01506 | 2554 | UCGAUACUUGUAUUUUUCA | 2616 | UGAAAAAUACAAGUAUCGA |
| ETD01507 | 2555 | CUACAAAGGUGAACUCAGA | 2617 | UCUGAGUUCACCUUUGUAG |
| ETD01508 | 2556 | AUGGAAGAAAAGCAGAACA | 2618 | UGUUCUGCUUUUCUUCCAU |
| ETD01509 | 2557 | CUUUCUACAAAGGUGAACA | 2619 | UGUUCACCUUUGUAGAAAG |

TABLE 12
Relative MTRES1 mRNA Levels in Livers of Mice

| | | | Dose | Mean MTRES1 mRNA |
|---|---|---|---|---|
| Group | n | Treatment | (ug) | (Normalized to Group 1, Day 14) |
| 1 | 3 | PBS | 0 | 1.00 |
| 2 | 3 | ETD01506 | 200 | 0.27 |
| 3 | 3 | ETD01507 | 200 | 0.00 |
| 4 | 3 | ETD01508 | 200 | 0.51 |
| 5 | 3 | ETD01509 | 200 | 0.51 |

### Example 9: Screening of siRNAs Targeting Human MTRES1 mRNA in Mice Transfected with AAV8 -TBG-h-MTRES1

[0350] Several siRNAs designed to be cross-reactive with human and cynomolgus monkey MTRES1 mRNA were tested for activity in mice following transfection with an adeno-associated viral vector. The siRNAs were attached to the GalNAc ligand ETL17. The siRNA sequences are shown in Table 13A, where “Nf” is a 2′ fluoro-modified nucleoside, “n” is a 2′ O-methyl modified nucleoside, “d” is a deoxynucleoside, and “s” is a phosphorothioate linkage.

[0351] Six to eight week old female mice (C571B1/6) were injected with 10 uL of a recombinant adeno-associated virus 8 (AAV8) vector (8.8×10E12 genome copies/mL) by the retroorbital route on Day −13. The recombinant AAV8 contained the open reading frame and the majority of the 3′UTR of the human MTRES1 sequence (NM 016487.5) under the control of the human thyroxine binding globulin promoter in an AAV2 backbone packaged in AAV8 capsid (AAV8-TBG-h-MTRES1). On Day 0, infected mice (n=4) were given a subcutaneous injection of a single 100 ug dose of a GalNAc-conjugated siRNA or PBS as vehicle control. were euthanized on Day 10 after subcutaneous injection and a liver sample from each was collected and placed in RNAlater (ThermoFisher Catalog #AMV7020) until processing. Total liver RNA was prepared by homogenizing the liver tissue in homogenization buffer (Maxwell RSC simply RNA Tissue Kit) using a Percellys 24 tissue homogenizer (Bertin Instruments) set at 5000 rpm for two 10 second cycles. Total RNA from the lysate was purified on a Maxwell RSC 48 platform (Promega Corporation) according to the manufacturer's recommendations. Preparation of cDNA was performed using Quanta qScript cDNA SuperMix (VWR, Catalog #95048-500) according to the manufacturer's instructions. The relative levels of liver MTRES1 mRNA were assessed by RT-qPCR in triplicate on a QuantStudio™ 6 Pro Real-Time PCR System using TaqMan assays for humanMTRES1 (ThermoFisher, assay #Hs01568158_g1) and the mouse housekeeping gene PPIA (ThermoFisher, assay #Mm02342430_g1) and PerfeCTa® qPCR FastMix®, Low ROX™ (VWR, Catalog #101419-222). Data were normalized to the mean MTRES1 mRNA level in animals receiving PBS. Results are shown in Table 14. Mice injected with ETDL1880, 1886, 1887, 1888, 1893 had greatest reductions in mean liver MTRES1 mRNA on Day 10 relative to mice receiving PBS.

TABLE 13A
Example siRNA Sequences

| | Sense | | Antisense | |
|---|---|---|---|---|
| | Strand | Sense Strand Sequence | Strand | |
| siRNA | SEQ ID | (5′-3′) | SEQ ID | Antisense Strand Sequence |
| Name | NO: | with GalNAc moiety | NO: | (5′-3′) |
| ETD01879 | 2471 | [ETL17]suacaaaCfUfCfUfguac | 2488 | usGfsgAfaGfuAfcAfgAfgUfu |
| | | uuccasusu | | UfgUfasusu |
| ETD01880 | 2472 | [ETL17]suguaCfUfUfCfCfugg | 2489 | usUfscGfaUfuCfcAfgGfaAfg |
| | | aaucgaasusu | | UfaCfasusu |
| ETD01881 | 2473 | [ETL17]suacuUfcCfUfdGgaau | 2490 | usUfsaUfcGfaUfuCfcAfgGfa |
| | | cgauaasusu | | AfgUfasusu |
| ETD01882 | 2474 | [ETL17]sgaaucGfAfuAfcuugua | 2491 | usAfsaAfuAfcAfaGfuAfuCfg |
| | | uuuasusu | | AfuUfcsusu |
| ETD01883 | 2475 | [ETL17]suucuagUfaCfCfaaguu | 2492 | usCfsgUfaAfcUfuGfgUfaCfu |
| | | acgasusu | | AfgAfasusu |
| ETD01884 | 2476 | [ETL17]saguuAfcGfuGfcAfcca | 2493 | usAfsaUfuUfgGfuGfcAfcGfu |
| | | aauuasusu | | AfaCfususu |
| ETD01885 | 2477 | [ETL17]suuacGfuGfcAfccaaau | 2494 | usAfsuAfaUfuUfgGfuGfcAfc |
| | | uauasusu | | GfuAfasusu |
| ETD01886 | 2478 | [ETL17]saaaaUfCfuaCfUfaaaa | 2495 | usGfsaCfuUfuUfuAfgUfaGfa |
| | | agucasusu | | UfuUfususu |
| ETD01887 | 2479 | [ETL17]saucuAfcuAfAfAfAfa | 2496 | usAfsgAfgAfcUfuUfuUfaGfu |
| | | gucucuasusu | | AfgAfususu |
| ETD01888 | 2480 | [ETL17]scuagaUfaUfUfgggaga | 2497 | usGfsuUfuCfuCfcCfaAfuAfu |
| | | aacasusu | | CfuAfgsusu |
| ETD01889 | 2481 | [ETL17]scauuggaUfCfUfUfcuc | 2498 | usCfsaAfuGfaGfaAfgAfuCfc |
| | | auugasusu | | AfaUfgsusu |
| ETD01890 | 2482 | [ETL17]suuggaUfCfUfUfCfuc | 2499 | usUfscCfaAfuGfaGfaAfgAfu |
| | | auuggaasusu | | CfcAfasusu |
| ETD01891 | 2483 | [ETL17]sauacAfgAfGfdTggug | 2500 | usCfsgUfaAfcAfcCfaCfuCfu |
| | | uuacgasusu | | GfuAfususu |
| ETD01892 | 2484 | [ETL17]saguuuAfAfAfGfuugc | 2501 | usCfsuUfaGfgCfaAfcUfuUfa |
| | | cuaagasusu | | AfaCfususu |
| ETD01893 | 2485 | [ETL17]suuuaaagUfUfgCfcuaa | 2502 | usUfsuCfuUfaGfgCfaAfcUfu |
| | | gaaasusu | | UfaAfasusu |
| ETD01894 | 2486 | [ETL17]suggaUfUfgCfUfuUfu | 2503 | usUfsuGfcUfaAfaAfaGfcAfa |
| | | uagcaaasusu | | UfcCfasusu |
| ETD01895 | 2487 | [ETL17]saaauAfaAfGfdTucucu | 2504 | usGfscUfaAfgAfgAfaCfuUfu |
| | | uagcasusu | | AfuUfususu |

TABLE 13B
Example siRNA Base Sequences

| siRNA | SEQ ID | Sense Strand Base Sequence | SEQ ID | Antisense Strand Base Sequence |
|---|---|---|---|---|
| Name | NO: | (5′-3′) | NO: | (5′-3′) |
| ETD01879 | 2558 | UACAAACUCUGUACUUCCAUU | 2620 | UGGAAGUACAGAGUUUGUAUU |
| ETD01880 | 2559 | UGUACUUCCUGGAAUCGAAUU | 2621 | UUCGAUUCCAGGAAGUACAUU |
| ETD01881 | 2560 | UACUUCCUGGAAUCGAUAAUU | 2622 | UUAUCGAUUCCAGGAAGUAUU |
| ETD01882 | 2561 | GAAUCGAUACUUGUAUUUAUU | 2623 | UAAAUACAAGUAUCGAUUCUU |
| ETD01883 | 2562 | UUCUAGUACCAAGUUACGAUU | 2624 | UCGUAACUUGGUACUAGAAUU |
| ETD01884 | 2563 | AGUUACGUGCACCAAAUUAUU | 2625 | UAAUUUGGUGCACGUAACUUU |
| ETD01885 | 2564 | UUACGUGCACCAAAUUAUAUU | 2626 | UAUAAUUUGGUGCACGUAAUU |
| ETD01886 | 2565 | AAAAUCUACUAAAAAGUCAUU | 2627 | UGACUUUUUAGUAGAUUUUUU |
| ETD01887 | 2566 | AUCUACUAAAAAGUCUCUAUU | 2628 | UAGAGACUUUUUAGUAGAUUU |
| ETD01888 | 2567 | CUAGAUAUUGGGAGAAACAUU | 2629 | UGUUUCUCCCAAUAUCUAGUU |
| ETD01889 | 2568 | CAUUGGAUCUUCUCAUUGAUU | 2630 | UCAAUGAGAAGAUCCAAUGUU |
| ETD01890 | 2569 | UUGGAUCUUCUCAUUGGAAUU | 2631 | UUCCAAUGAGAAGAUCCAAUU |
| ETD01891 | 2570 | AUACAGAGTGGUGUUACGAUU | 2632 | UCGUAACACCACUCUGUAUUU |
| ETD01892 | 2571 | AGUUUAAAGUUGCCUAAGAUU | 2633 | UCUUAGGCAACUUUAAACUUU |
| ETD01893 | 2572 | UUUAAAGUUGCCUAAGAAAUU | 2634 | UUUCUUAGGCAACUUUAAAUU |
| ETD01894 | 2573 | UGGAUUGCUUUUUAGCAAAUU | 2635 | UUUGCUAAAAAGCAAUCCAUU |
| ETD01895 | 2574 | AAAUAAAGTUCUCUUAGCAUU | 2636 | UGCUAAGAGAACUUUAUUUUU |
| | | Sense Strand Base Sequence | | Antisense Strand Base Sequence |
| siRNA | SEQ ID | (5′-3′), | SEQ ID | (5′-3′), |
| Name | NO: | without 3′ overhangs | NO: | without 3′ overhangs |
| ETD01879 | 2575 | UACAAACUCUGUACUUCCA | 2637 | UGGAAGUACAGAGUUUGUA |
| ETD01880 | 2576 | UGUACUUCCUGGAAUCGAA | 2638 | UUCGAUUCCAGGAAGUACA |
| ETD01881 | 2577 | UACUUCCUGGAAUCGAUAA | 2639 | UUAUCGAUUCCAGGAAGUA |
| ETD01882 | 2578 | GAAUCGAUACUUGUAUUUA | 2640 | UAAAUACAAGUAUCGAUUC |
| ETD01883 | 2579 | UUCUAGUACCAAGUUACGA | 2641 | UCGUAACUUGGUACUAGAA |
| ETD01884 | 2580 | AGUUACGUGCACCAAAUUA | 2642 | UAAUUUGGUGCACGUAACU |
| ETD01885 | 2581 | UUACGUGCACCAAAUUAUA | 2643 | UAUAAUUUGGUGCACGUAA |
| ETD01886 | 2582 | AAAAUCUACUAAAAAGUCA | 2644 | UGACUUUUUAGUAGAUUUU |
| ETD01887 | 2583 | AUCUACUAAAAAGUCUCUA | 2645 | UAGAGACUUUUUAGUAGAU |
| ETD01888 | 2584 | CUAGAUAUUGGGAGAAACA | 2646 | UGUUUCUCCCAAUAUCUAG |
| ETD01889 | 2585 | CAUUGGAUCUUCUCAUUGA | 2647 | UCAAUGAGAAGAUCCAAUG |
| ETD01890 | 2586 | UUGGAUCUUCUCAUUGGAA | 2648 | UUCCAAUGAGAAGAUCCAA |
| ETD01891 | 2587 | AUACAGAGTGGUGUUACGA | 2649 | UCGUAACACCACUCUGUAU |
| ETD01892 | 2588 | AGUUUAAAGUUGCCUAAGA | 2650 | UCUUAGGCAACUUUAAACU |
| ETD01893 | 2589 | UUUAAAGUUGCCUAAGAAA | 2651 | UUUCUUAGGCAACUUUAAA |
| ETD01894 | 2590 | UGGAUUGCUUUUUAGCAAA | 2652 | UUUGCUAAAAAGCAAUCCA |
| ETD01895 | 2591 | AAAUAAAGTUCUCUUAGCA | 2653 | UGCUAAGAGAACUUUAUUU |

TABLE 14
Relative human MTRES1 mRNA Levels in Livers of Mice

| | | | Dose | Mean MTRES1 mRNA |
|---|---|---|---|---|
| Group | n | Treatment | (ug) | (Normalized to Group 1, Day 10) |
| 1 | 4 | PBS | 0 | 1.00 |
| 2 | 4 | ETD01879 | 100 | 0.70 |
| 3 | 4 | ETD01880 | 100 | 0.45 |
| 4 | 4 | ETD01881 | 100 | 0.78 |
| 5 | 4 | ETD01882 | 100 | 2.07 |
| 6 | 4 | ETD01883 | 100 | 1.24 |
| 7 | 4 | ETD01884 | 100 | 1.12 |
| 8 | 4 | ETD01885 | 100 | 0.97 |
| 9 | 4 | ETD01886 | 100 | 0.46 |
| 10 | 4 | ETD01887 | 100 | 0.18 |
| 11 | 4 | ETD01888 | 100 | 0.14 |
| 12 | 4 | ETD01889 | 100 | 0.74 |
| 13 | 4 | ETD01890 | 100 | 1.73 |
| 14 | 4 | ETD01891 | 100 | 3.21 |
| 15 | 4 | ETD01892 | 100 | 2.59 |
| 16 | 4 | ETD01893 | 100 | 0.55 |
| 17 | 4 | ETD01894 | 100 | 1.12 |
| 18 | 4 | ETD01895 | 100 | 0.65 |

### Example 10: Screening siRNAs Targeting Human and Mouse MTRES1 in Mice

[0352] Several siRNAs designed to be cross-reactive with human, mouse and cynomolgus monkey MTRES1 mRNA were tested for activity in mice. The siRNAs were attached to the GalNAc ligand ETL1 or ETL17. The siRNA sequences are shown in Table 15A, where Nf is a 2′ fluoro-modified nucleoside, n is a 2′ O-methyl modified nucleoside, “d” is a deoxynucleoside, and “s” is a phosphorothioate linkage.

[0353] Six to eight week old female mice (strain ICR, n=3) were given a subcutaneous injection on Day 0 of a single 200 ug dose of a GalNAc-conjugated siRNA or PBS as vehicle control.

[0354] Mice were euthanized on Day 10 after injection and a liver sample from each was collected and placed in RNAlater (ThermoFisher Catalog #AM7020) until processing. Total liver RNA was prepared by homogenizing the liver tissue in homogenization buffer (Maxwell RSC simply RNA Tissue Kit) using a Percellys 24 tissue homogenizer (Bertin Instruments) set at 5000 rpm for two 10 second cycles. Total RNA from the lysate was purified on a Maxwell RSC 48 platform (Promega Corporation) according to the manufacturer's recommendations. Preparation of cDNA was performed using Quanta qScript cDNA SuperMix (VWR, Catalog #95048-500) according to the manufacturer's instructions. The relative levels of liver MTRES1 mRNA were assessed by RT-qPCR in triplicate on a QuantStudio™ 6 Pro Real-Time PCR System using TaqMan assays for mouse MTRES1 (ThermoFisher, assay #Mm01229834 ml) and the mouse housekeeping gene PPIA (ThermoFisher, assay #Mm02342430_g1) and PerfeCTaR qPCR FastMix®, Low ROX™ (VWR, Catalog #101419-222). Data were normalized to the mean MTRES1 mRNA level in animals receiving PBS. Results are shown in Table 16. Mice injected with ETD01597, ETD01955, ETD01958, and had substantially lower levels in mean liver MTRES1 mRNA on Day 10 relative to mice receiving PBS.

TABLE 15A
Example siRNA Sequences

| | Sense | | Antisense | |
|---|---|---|---|---|
| | Strand | Sense Strand Sequence | Strand | |
| siRNA | SEQ ID | (5′-3′) | SEQ ID | Antisense Strand Sequence |
| Name | NO: | with GalNAc moiety | NO: | (5′-3′) |
| ETD01597 | 2505 | [ETL1]sguaucuccAfgAfauguu | 2515 | usAfsuAfaCfaUfuCfuGfgAfgA |
| | | auasusu | | fuAfcsusu |
| ETD01954 | 2506 | [ETL17]sacuuccuGfGfAfAfuc | 2516 | usGfsuAfsuCfgAfuUfcCfaGfg |
| | | gauacasusu | | AfaGfususu |
| ETD01955 | 2507 | [ETL17]scuuccuGfGfAfAfucg | 2517 | usAfsgUfaUfcGfaUfuCfcAfgG |
| | | auacuasusu | | faAfgsusu |
| ETD01956 | 2508 | [ETL17]scuggAfAfucGfAfuac | 2518 | usUfsaCfaAfgUfaUfcGfaUfuCf |
| | | uuguaasusu | | cAfgsusu |
| ETD01957 | 2509 | [ETL17]sggaaUfCfgaUfaCfuu | 2519 | usAfsaUfaCfaAfgUfaUfcGfaUf |
| | | guauuasusu | | uCfcsusu |
| ETD01958 | 2510 | [ETL17]sgaugCfUfuUfCfuaca | 2520 | usAfscCfuUfuGfuAfgAfaAfgC |
| | | aagguasusu | | faUfcsusu |
| ETD01959 | 2511 | [ETL17]sagaaAfAfgcAfGfaac | 2521 | usUfscAfcCfgUfuCfuGfcUfuU |
| | | ggugaasusu | | fuCfususu |
| ETD01960 | 2512 | [ETL17]saagcagAfAfdCGfgu | 2522 | usAfscUfuUfcAfcCfgUfuCfuG |
| | | gaaaguasusu | | fcUfususu |
| ETD01961 | 2513 | [ETL17]sagugGfGfaGfAfuAf | 2523 | usUfscCfaAfuGfuAfuCfuCfcCf |
| | | cauuggaasusu | | aCfususu |
| ETD01962 | 2514 | [ETL17]sugggAfGfauAfcAfu | 2524 | usGfsaUfcCfaAfuGfuAfuCfuC |
| | | uggaucasusu | | fcCfasusu |

TABLE 15B
Example siRNA Base Sequences

| siRNA | SEQ ID | Sense Strand Base Sequence | SEQ ID | Antisense Strand Base Sequence |
|---|---|---|---|---|
| Name | NO: | (5′ to 3′) | NO: | (5′ to 3′) |
| ETD01597 | 2592 | GUAUCUCCAGAAUGUUAUAUU | 2654 | UAUAACAUUCUGGAGAUACUU |
| ETD01954 | 2593 | ACUUCCUGGAAUCGAUACAUU | 2655 | UGUAUCGAUUCCAGGAAGUUU |
| ETD01955 | 2594 | CUUCCUGGAAUCGAUACUAUU | 2656 | UAGUAUCGAUUCCAGGAAGUU |
| ETD01956 | 2595 | CUGGAAUCGAUACUUGUAAUU | 2657 | UUACAAGUAUCGAUUCCAGUU |
| ETD01957 | 2596 | GGAAUCGAUACUUGUAUUAUU | 2658 | UAAUACAAGUAUCGAUUCCUU |
| ETD01958 | 2597 | GAUGCUUUCUACAAAGGUAUU | 2659 | UACCUUUGUAGAAAGCAUCUU |
| ETD01959 | 2598 | AGAAAAGCAGAACGGUGAAUU | 2660 | UUCACCGUUCUGCUUUUCUUU |
| ETD01960 | 2599 | AAGCAGAACGGUGAAAGUAUU | 2661 | UACUUUCACCGUUCUGCUUUU |
| ETD01961 | 2600 | AGUGGGAGAUACAUUGGAAUU | 2662 | UUCCAAUGUAUCUCCCACUUU |
| ETD01962 | 2601 | UGGGAGAUACAUUGGAUCAUU | 2663 | UGAUCCAAUGUAUCUCCCAUU |
| siRNA | SEQ ID | Sense Strand Base Sequence (5′ to | SEQ ID | Antisense Strand Base Sequence |
| Name | NO: | 3′), | NO: | (5′ to 3′), without 3′ overhangs |
| ETD01597 | 2602 | GUAUCUCCAGAAUGUUAUA | 2664 | UAUAACAUUCUGGAGAUAC |
| ETD01954 | 2603 | ACUUCCUGGAAUCGAUACA | 2665 | UGUAUCGAUUCCAGGAAGU |
| ETD01955 | 2604 | CUUCCUGGAAUCGAUACUA | 2666 | UAGUAUCGAUUCCAGGAAG |
| ETD01956 | 2605 | CUGGAAUCGAUACUUGUAA | 2667 | UUACAAGUAUCGAUUCCAG |
| ETD01957 | 2606 | GGAAUCGAUACUUGUAUUA | 2668 | UAAUACAAGUAUCGAUUCC |
| ETD01958 | 2607 | GAUGCUUUCUACAAAGGUA | 2669 | UACCUUUGUAGAAAGCAUC |
| ETD01959 | 2608 | AGAAAAGCAGAACGGUGAA | 2670 | UUCACCGUUCUGCUUUUCU |
| ETD01960 | 2609 | AAGCAGAACGGUGAAAGUA | 2671 | UACUUUCACCGUUCUGCUU |
| ETD01961 | 2610 | AGUGGGAGAUACAUUGGAA | 2672 | UUCCAAUGUAUCUCCCACU |
| ETD01962 | 2611 | UGGGAGAUACAUUGGAUCA | 2673 | UGAUCCAAUGUAUCUCCCA |

TABLE 16
Relative MTRES1 mRNA Levels in Livers of Mice

| | | | Dose | Mean MTRES1 mRNA |
|---|---|---|---|---|
| Group | n | Treatment | (ug) | (Normalized to Group 1, Day 10) |
| 1 | 3 | PBS | | 1.00 |
| 2 | 3 | ETD01597 | 200 | 0.13 |
| 3 | 3 | ETD01954 | 200 | 1.03 |
| 4 | 3 | ETD01955 | 200 | 0.16 |
| 5 | 3 | ETD01956 | 200 | 0.62 |
| 6 | 3 | ETD01957 | 200 | 0.31 |
| 7 | 3 | ETD01958 | 200 | 0.18 |
| 8 | 3 | ETD01959 | 200 | 0.53 |
| 9 | 3 | ETD01960 | 200 | 0.69 |
| 10 | 3 | ETD01961 | 200 | 0.33 |
| 11 | 3 | ETD01962 | 200 | 0.79 |

### Example 11: Oligonucleotide Synthesis

[0355] Oligonucleotides such as siRNAs may be synthesized according to phosphoramidite technology on a solid phase. For example, a K&A oligonucleotide synthesizer may be used. Syntheses may be performed on a solid support made of controlled pore glass (CPG, 500 Å or 600 Å, obtained from AM Chemicals, Oceanside, CA, USA). All 2′-OMe and 2′-F phosphoramidites may be purchased from Hongene Biotech (Union City, CA, USA). All phosphoramidites may be dissolved in anhydrous acetonitrile (100 mM) and molecular sieves (3 Å) may be added. 5-Benzylthio-1H-tetrazole (BTT, 250 mM in acetonitrile) or 5-Ethylthio-1H-tetrazole (ETT, 250 mM in acetonitrile) may be used as activator solution. Coupling times may be 9-18 min (e.g. with a GalNAc such as ETL17), 6 min (e.g. with 2′OMe and 2′F). In order to introduce phosphorothioate linkages, a 100 mM solution of 3-phenyl 1,4-dithiazoline-5-one (POS, obtained from PolyOrg, Inc., Leominster, Mass., USA) in anhydrous acetonitrile may be employed.

[0356] After solid phase synthesis, the dried solid support may be treated with a 1:1 volume solution of 40 wt. % methylamine in water and 28% ammonium hydroxide solution (Aldrich) for two hours at 30° C. The solution may be evaporated and the solid residue may be reconstituted in water and purified by anionic exchange HPLC using a TKSgel SuperQ-5PW 13u column. Buffer A may be 20 mM Tris, 5 mM EDTA, pH 9.0 and contained 20% Acetonitrile and buffer B may be the same as buffer A with the addition of 1 M sodium chloride. UV traces at 260 nm may be recorded. Appropriate fractions may be pooled then desalted using Sephadex G-25 medium.

[0357] Equimolar amounts of sense and antisense strand may be combined to prepare a duplex. The duplex solution may be prepared in 0.1×PBS (Phosphate-Buffered Saline, 1×, Gibco). The duplex solution may be annealed at 95° C. for 5 min, and cooled to room temperature slowly. Duplex concentration may be determined by measuring the solution absorbance on a UV-Vis spectrometer at 260 nm in 0.1×PBS. For some experiments, a conversion factor may be calculated from an experimentally determined extinction coefficient.

### Example 12: GalNAc Ligand for Hepatocyte Targeting of Oligonucleotides

[0358] Without limiting the disclosure to these individual methods, there are at least two general methods for attachment of multivalent N-acetylgalactosamine (GalNAc) ligands to oligonucleotides: solid or solution-phase conjugations. GalNAc ligands may be attached to solid phase resin for 3′ conjugation or at the 5′ terminus using GalNAc phosphoramidite reagents. GalNAc phosphoramidites may be coupled on solid phase as for other nucleosides in the oligonucleotide sequence at any position in the sequence. Reagents for GalNAc conjugation to oligonucleotides are shown in Table 17.

TABLE 17
GalNAc Conjugation Reagents

| Type of | |
|---|---|
| conjugation | Structure |
| Solid phase 3′ attachment where squiggly line is rest of oligonucleotide chain and right- most OH is where attachment\grave{ } to solid phase is. | [chemical structure] |
| | This GalNAc ligand may be referred to as “GalNAc23” or “GalNAc#23.” |
| Solid phase 5′ attachment phosphoramidite | [chemical structure] |
| Solid phase 5′ attachment Phosphoramidite | [chemical structure] |
| Solution phase Carboxylic acid for amide coupling anywhere on oligonucleotide | [chemical structure] |
| | Where Ac is an acetyl group or other hydroxyl protecting group that can be removed |
| | under basic, acid or reducing conditions. |

[0359] In solution phase conjugation, the oligonucleotide sequence-including a reactive conjugation site—is formed on the resin. The oligonucleotide is then removed from the resin and GalNAc is conjugated to the reactive site.

[0360] The carboxy GalNAc derivatives may be coupled to amino-modified oligonucleotides. The peptide coupling conditions are known to the skilled in the art using a carbodiimide coupling agent like DCC (N,N′-Dicyclohexylcarbodiimide), EDC (N-(3-dimethylaminopropyl)-N′-ethylcarbodiimide) or EDC·HCl (N-(3-dimethylaminopropyl)-N′-ethylcarbodiimide hydrochloride and an additive like HOBt (1-hydroxybenztriazole), HOSu (N-hydroxysuccinimide), TBTU (N,N,N′,N′-Tetramethyl-O-(benzotriazol-1-yl)uronium tetrafluoroborate, HBTU (2-(1H-benzotriazol-1-yl)-1,1,3,3-tetramethyluronium hexafluorophosphate) or HOAt (1-Hydroxy-7-azabenzotriazole and common combinations thereof such as TBTU/HOBt or HBTU/HOAt to form activated amine-reactive esters.

[0361] Amine groups may be incorporated into oligonucleotides using a number of known, commercially available reagents at the 5′ terminus, 3′ terminus or anywhere in between.

[0362] Non-limiting examples of reagents for oligonucleotide synthesis to incorporate an amino group include:
[0363] 5′ attachment:
[0364] 6-(4-Monomethoxytritylamino)hexyl-(2-cyanoethyl)-(N,N-diisopropyl)-phosphoramidite CAS Number: 114616-27-2
[0365] 5′-Amino-Modifier TEG CE-Phosphoramidite
[0366] 10-(O-trifluoroacetamido-N-ethyl)-triethyleneglycol-1-[(2-cyanoethyl)-(N,N-diisoprol-)]-phosphoramidite
[0367] 3′ attachment:
[0368] 3′-Amino-Modifier Serinol CPG
[0369] 3-Dimethoxytrityloxy-2-(3-(fluorenylmethoxycarbonylamino)propanamido)propyl-1-O-succinyl-long chain alkylamino-CPG (where CPG stands for controlled-pore glass and is the solid support)
[0370] 3′-Amino-Modifier Serinol Phosphoramidite
[0371] 3-Dimethoxytrityloxy-2-(3-(fluorenylmethoxycarbonylamino)propanamido)propyl-1-O-(-2-cyanoethyl)-(N,N-diisopropyl)-phosphoramidite

### Internal (Base Modified):

[0372] Amino-Modifier C6 dT
[0373] 5′-Dimethoxytrityl-5-[N-(trifluoroacetylaminohexyl)-3-acrylimido]-2′-deoxyUridine,3′-[((2-cyanoethyl)-(N,N-diisopropyl)]-phosphoramidite. CAS Number: 178925-21-8

[0374] Solution phase conjugations may occur after oligonucleotide synthesis via reactions between non-nucleosidic nucleophilic functional groups that are attached to the oligonucleotide and electrophilic GalNAc reagents. Examples of nucleophilic groups include amines and thiols, and examples of electrophilic reagents include activated esters (e.g. N-hydroxysuccinimide, pentafluorophenyl) and maleimides.

### Example 13: GalNAc Ligands for Hepatocyte Targeting of Oligonucleotides

[0375] Without limiting the disclosure to these individual methods, there are at least two general methods for attachment of multivalent N-acetylgalactosamine (GalNAc) ligands to oligonucleotides: solid or solution-phase conjugations. GalNAc ligands may be attached to solid phase resin for 3′ conjugation or at the 5′ terminus using GalNAc phosphoramidite reagents. GalNAc phosphoramidites may be coupled on solid phase as for other nucleosides in the oligonucleotide sequence at any position in the sequence. A non-limiting example of a phosphoramidite reagent for GalNAc conjugation to a 5′ end oligonucleotide is shown in Table 18.

TABLE 18
GalNAc Conjugation Reagent

| Type of | |
|---|---|
| conjugation | Structure |
| Solid phase 5′ attachment phosphoramidite | [chemical structure] |

[0376] The following includes examples of synthesis reactions used to create a GalNAc moiety:

### Scheme for the Preparation of NAcegal-Linker-TMSOTf

[chemical structure]

### General Procedure for Preparation of Compound 2A

[chemical structure]

[0379] To a solution of Compound 1A (500 g, 4.76 mol, 476 mL) in 2-Methyl-THF (2.00 L) is added CbzCl (406 g, 2.38 mol, 338 mL) in 2-Methyl-THF (750 mL) dropwise at 0° C. The mixture is stirred at 25° C. for 2 hrs under N₂ atmosphere. TLC (DCM:MeOH=20:1, PMA) may indicate CbzCl is consumed completely and one new spot (R_{f}=0.43) formed. The reaction mixture is added HCl/EtOAc (1 N, 180 mL) and stirred for 30 mins, white solid is removed by filtration through celite, the filtrate is concentrated under vacuum to give Compound 2A (540 g, 2.26 mol, 47.5% yield) as a pale yellow oil and used into the next step without further purification. ¹H NMR: δ 7.28-7.41 (m, 5H), 5.55 (br s, 1H), 5.01-5.22 (m, 2H), 3.63-3.80 (m, 2H), 3.46-3.59 (m, 4H), 3.29-3.44 (m, 2H), 2.83-3.02 (m, 1H).

### General Procedure for Preparation of Compound 4A

[chemical structure]

[0381] To a solution of Compound 3A (1.00 kg, 4.64 mol, HCl) in pyridine (5.00 L) is added acetyl acetate (4.73 kg, 46.4 mol, 4.34 L) dropwise at 0° C. under N₂ atmosphere. The mixture is stirred at 25° C. for 16 hrs under N₂ atmosphere. TLC (DCM:MeOH=20:1, PMA) indicated Compound 3A is consumed completely and two new spots (R_{f}=0.35) formed. The reaction mixture is added to cold water (30.0 L) and stirred at 0° C. for 0.5 hr, white solid formed, filtered and dried to give Compound 4A (1.55 kg, 3.98 mol, 85.8% yield) as a white solid and used in the next step without further purification. ¹H NMR: δ 7.90 (d, J=9.29 Hz, 1H), 5.64 (d, J=8.78 Hz, 1H), 5.26 (d, J=3.01 Hz, 1H), 5.06 (dd, J=11.29, 3.26 Hz, 1H), 4.22 (t, J=6.15 Hz, 1H), 3.95-4.16 (m, 3H), 2.12 (s, 3H), 2.03 (s, 3H), 1.99 (s, 3H), 1.90 (s, 3H), 1.78 (s, 3H).

### General Procedure for Preparation of Compound 5A

[chemical structure]

[0383] To a solution of Compound 4A (300 g, 771 mmol) in DCE (1.50 L) is added TMSOTf (257 g, 1.16 mol, 209 mL) and stirred for 2 hrs at 60° C., and then stirred for 1 hr at 25° C. Compound 2A (203 g, 848 mmol) is dissolved in DCE (1.50 L) and added 4 Å powder molecular sieves (150 g) stirring for 30 mins under N₂ atmosphere. Then the solution of Compound 4A in DCE is added dropwise to the mixture at 0° C. The mixture is stirred at 25° C. for 16 hrs under N₂ atmosphere. TLC (DCM:MeOH=25:1, PMA) indicated Compound 4A is consumed completely and new spot (R_{f}=0.24) formed. The reaction mixture is filtered and washed with sat. NaHCO₃ (2.00 L), water (2.00 L) and sat. brine (2.00 L). The organic layer is dried over anhydrous Na₂SO4, filtered and concentrated under reduced pressure to give a residue. The residue is triturated with 2-Me-THE/heptane (5/3, v/v, 1.80 L) for 2 hrs, filtered and dried to give Compound 5A (225 g, 389 mmol, 50.3% yield, 98.4% purity) as a white solid. ¹H NMR: δ 7.81 (d, J 9.29 Hz, 1H), 7.20-7.42 (m, 6H), 5.21 (d, J=3.26 Hz, 1H), 4.92-5.05 (m, 3H), 4.55 (d, J=8.28 Hz, 1H), 3.98-4.07 (m, 3H), 3.82-3.93 (m, 1H), 3.71-3.81 (m, 1H), 3.55-3.62 (m, 1H), 3.43-3.53 (m, 2H), 3.37-3.43 (m, 2H), 3.14 (q, J=5.77 Hz, 2H), 2.10 (s, 3H), 1.99 (s, 3H), 1.89 (s, 3H), 1.77 (s, 3H).

### General Procedure for Preparation of NAcegal-Linker-Tosylate Salt

[chemical structure]

[0385] To a solution of Compound 5A (200 g, 352 mmol) in THF (1.0 L) is added dry Pd/C (15.0 g, 10% purity) and TsOH (60.6 g, 352 mmol) under N₂ atmosphere. The suspension is degassed under vacuum and purged with H₂ several times. The mixture is stirred at 25° C. for 3 hrs under H₂ (45 psi) atmosphere. TLC (DCM:MeOH=10:1, PMA) indicated Compound 5A is consumed completely and one new spot (R_{f}=0.04) is formed. The reaction mixture is filtered and concentrated (<40° C.) under reduced pressure to give a residue. Diluted with anhydrous DCM (500 mL, dried overnight with 4 Å molecular sieves (dried at 300° C. for 12 hrs)) and concentrate to give a residue and run Karl Fisher (KF) to check for water content. This is repeated 3 times with anhydrous DCM (500 mL) dilutions and concentration to give NAcegal-Linker-TMSOTf (205 g, 95.8% yield, TsOH salt) as a foamy white solid. ¹H NMR: δ 7.91 (d, J 9.03 Hz, 1H), 7.53-7.86 (m, 2H), 7.49 (d, J=8.03 Hz, 2H), 7.13 (d, J=8.03 Hz, 2H), 5.22 (d, J 3.26 Hz, 1H), 4.98 (dd, J=11.29, 3.26 Hz, 1H), 4.57 (d, J=8.53 Hz, 1H), 3.99-4.05 (m, 3H), 3.8-3.94 (m, 1H), 3.79-3.85 (m, 1H), 3.51-3.62 (m, 5H), 2.96 (br t, J=5.14 Hz, 2H), 2.29 (s, 3H), 2.10 (s, 3H), 2.00 (s, 3H), 1.89 (s, 3H), 1.78 (s, 3H).

### Scheme for the Preparation of TRIS-PEG2-CBZ

[chemical structure]

[chemical structure]

### General Procedure for Preparation of Compound 5B

[chemical structure]

[0388] To a solution of Compound 4B (400 g, 1.67 mol, 1.00 eq) and NaOH (10 M, 16.7 mL, 0.10 eq) in THF (2.00 L) is added Compound 4B_2 (1.07 kg, 8.36 mol, 1.20 L, 5.00 eq), the mixture is stirred at 30° C. for 2 hrs. LCMS showed the desired MS is given. Five batches of solution are combined to one batch, then the mixture is diluted with water (6.00 L), extracted with ethyl acetate (3.00 L*3), the combined organic layer is washed with brine (3.00 L), dried over Na₂SO₄, filtered and concentrated under vacuum. The crude is purified by column chromatography (SiO₂, petroleum ether:ethyl acetate=100:1-10:1, R_{f}=0.5) to give Compound 5B (2.36 kg, 6.43 mol, 76.9% yield) as light yellow oil. HNMR: δ 7.31-7.36 (m, 5H), 5.38 (s, 1H), 5.11-5.16 (m, 2H), 3.75 (t, J=6.4 Hz), 3.54-3.62 (m, 6H), 3.39 (d, J=5.2 Hz), 2.61 (t, J=6.0 Hz).

### General Procedure for Preparation of 3-oxo-1-phenyl-2,7,10-trioxa-4-azatridecan-13-oic acid (Compound 2B below)

[chemical structure]

[0390] To a solution of Compound 5B (741 g, 2.02 mol, 1.00 eq) in DCM (2.80 L) is added TFA (1.43 kg, 12.5 mol, 928 mL, 6.22 eq), the mixture is stirred at 25° C. for 3 hrs. LCMS showed the desired MS is given. The mixture is diluted with DCM (5.00 L), washed with water (3.00 L*3), brine (2.00 L), the combined organic layer is dried over Na₂SO₄, filtered and concentrated under vacuum to give Compound 2B (1800 g, crude) as light yellow oil. HNMR: δ 9.46 (s, 5H), 7.27-7.34 (m, 5H), 6.50-6.65 (m, 1H), 5.71 (s, 1H), 5.10-5.15 (m, 2H), 3.68-3.70 (m, 14H), 3.58-3.61 (m, 6H), 3.39 (s, 2H), 2.55 (s, 6H), 2.44 (s, 2H).

### General Procedure for Preparation of Compound 3B

[chemical structure]

[0392] To a solution of Compound 2B (375 g, 999 mmol, 83.0% purity, 1.00 eq) in DCM (1.80 L) is added HATU (570 g, 1.50 mol, 1.50 eq) and DIEA (258 g, 2.00 mol, 348 mL, 2.00 eq) at 0° C., the mixture is stirred at 0° C. for 30 min, then Compound 1B (606 g, 1.20 mol, 1.20 eq) is added, the mixture is stirred at 25° C. for 1 hr. LCMS showed desired MS is given. The mixture is combined to one batch, then the mixture is diluted with DCM (5.00 L), washed with 1 N HCl aqueous solution (2.00 L*2), then the organic layer is washed with saturated Na₂CO₃ aqueous solution (2.00 L*2) and brine (2.00 L), the organic layer is dried over Na₂SO₄, filtered and concentrated under vacuum to give Compound 3B (3.88 kg, crude) as yellow oil.

### General Procedure for Preparation of TRIS-PEG2-CBZ

[chemical structure]

[0394] A solution of Compound 3B (775 g, 487 mmol, 50.3% purity, 1.00 eq) in HCl/dioxane (4 M, 2.91 L, 23.8 eq) is stirred at 25° C. for 2 hrs. LCMS showed the desired MS is given. The mixture is concentrated under vacuum to give a residue. Then the combined residue is diluted with DCM (5.00 L), adjusted to pH=8 with 2.5 MNaOH aqueous solution, and separated. The aqueous phase is extracted with DCM (3.00 L) again, then the aqueous solution is adjusted to pH=3 with 1 N HCl aqueous solution, then extracted with DCM (5.00 L*2), the combined organic layer is washed with brine (3.00 L), dried over Na₂SO₄, filtered and concentrated under vacuum. The crude is purified by column chromatography (SiO₂, DCM:MeOH=0:1-12:1, 0.1% HOAc, R_{f}=0.4). The residue is diluted with DCM (5.00 L), adjusted to pH=8 with 2.5 M NaOH aqueous solution, separated, the aqueous solution is extracted with DCM (3.00 L) again, then the aqueous solution is adjusted to pH=3 with 6 N HCl aqueous solution, extracted with DCM:MeOH=10:1 (5.00 L*2), the combined organic layer is washed with brine (2.00 L), dried over Na₂SO₄, filtered and concentrated under vacuum to give a residue. Then the residue is diluted with MeCN (5.00 L), concentrated under vacuum, repeat this procedure twice to remove water to give TRIS-PEG2-CBZ (1.25 kg, 1.91 mol, 78.1% yield, 95.8% purity) as light yellow oil. ¹HNMR: 400 MHz, MeOD, δ 7.30-7.35 (5H), 5.07 (s, 2H), 3.65-3.70 (m, 16H), 3.59 (s, 4H), 3.45 (t, J=5.6 Hz), 2.51 (t, J=6.0 Hz), 2.43 (t, 6.4 Hz).

### Scheme for the Preparation of TriNGal-TRIS-Peg2-Phosph 8c

[chemical structure]

[chemical structure]

[chemical structure]

[chemical structure]

### TriGNl-TRIS-Peg2-Phosph 8c

### General Procedure for Preparation of Compound 3C

[chemical structure]

[0397] To a solution of Compound 1C (155 g, 245 mmol, 1.00 eq) in ACN (1500 mL) is added TBTU (260 g, 811 mmol, 3.30 eq), DIEA (209 g, 1.62 mol, 282 mL, 6.60 eq) and Compound 2C (492 g, 811 mmol, 3.30 eq, TsOH) at 0° C., the mixture is stirred at 15° C. for 16 hrs. LCMS showed the desired MS is given. The mixture is concentrated under vacuum to give a residue, then the mixture is diluted with DCM (2000 mL), washed with 1 N HCl aqueous solution (700 mL*2), then saturated NaHCO₃ aqueous solution (700 mL*2) and concentrated under vacuum. The crude is purified by column chromatography to give Compound 3C (304 g, 155 mmol, 63.1% yield, 96.0% purity) as a yellow solid.

### General Procedure for Preparation of Compound 4C

[chemical structure]

[0399] Two batches solution of Compound 3C (55.0 g, 29.2 mmol, 1.00 eq) in MeOH (1600 mL) is added Pd/C (6.60 g, 19.1 mmol, 10.0% purity) and TFA (3.34 g, 29.2 mmol, 2.17 mL, 1.00 eq), the mixture is degassed under vacuum and purged with H₂. The mixture is stirred under H₂ (15 psi) at 15° C. for 2 hours. LCMS showed the desired MS is given. The mixture is filtered and the filtrate is concentrated under vacuum to give Compound 4C (106 g, 54.8 mmol, 93.7% yield, 96.2% purity, TFA) as a white solid.

### General Procedure for Preparation of Compound 5C

[chemical structure]

[0401] Two batches in parallel. To a solution of EDCI (28.8 g, 150 mmol, 1.00 eq) in DCM (125 mL) is added compound 4a (25.0 g, 150 mmol, 1.00 eq) dropwise at 0° C., then the mixture is added to compound 4 (25.0 g, 150 mmol, 1.00 eq) in DCM (125 mL) at 0° C., then the mixture is stirred at 25° C. for 1 hr. TLC (Petroleum ether:Ethyl acetate=3:1, R_{f}=0.45) showed the reactant is consumed and one new spot is formed. The reaction mixture is diluted with DCM (100 mL) then washed with aq.NaHCO₃ (250 mL*1) and brine (250 mL), dried over Na₂SO₄, filtered and concentrated under reduced pressure to give a residue. The residue is purified by colunn chromatography (SiO₂, Petroleum ether:Ethyl acetate=100 i 1 to 3:1), TLC (SiO₂, Petroleum ether:Ethyl acetate=3:1), R_{f}=0.45, then concentrated under reduced pressure to give a residue. Compound 5C (57.0 g, 176 mmol, 58.4% yield, 96.9% purity) is obtained as colorless oil and confirmed ¹HNMR: EW33072-2-P1A, 400 MHz, DMSO (9.21 (s, 1H), 7.07-7.09 (m, 2H), 6.67-6.70 (m, 2H), 3.02-3.04 (m, 2H), 2.86-2.90 (m, 2H)

### General Procedure for Preparation of Compound 6

[chemical structure]

[0403] To a mixture of compound 3 (79.0 g, 41.0 mmol, 96.4% purity, 1.00 eq, TFA) and compound 6C (14.2 g, 43.8 mmol, 96.9% purity, 1.07 eq) in DCM (800 mL) is added TEA (16.6 g, 164 mmol, 22.8 mL, 4.00 eq) dropwise at 0° C., the mixture is stirred at 15° C. for 16 hrs. LCMS (EW33072-12-P1B, Rt=0.844 min) showed the desired mass is detected. The reaction mixture is diluted with DCM (400 mL) and washed with aq.NaHCO₃ (400 mL*1) and brine (400 mL*1), then the mixture is diluted with DCM (2.00 L) and washed with 0.7 M Na₂CO₃ (1000 mL*3) and brine (800 mL*3), dried over Na₂SO₄, filtered and concentrated under reduced pressure to give a residue. The residue is used to next step directly without purification. Compound 6 (80.0 g, crude) is obtained as white solid and confirmed via ¹HNMR: EW33072-12-P1A, 400 MHz, MeOD δ 7.02-7.04 (m, 2H), 6.68-6.70 (m, 2H), 5.34-5.35 (s, 3H), 5.07-5.08 (d, J=4.00 Hz, 3H), 4.62-4.64 (d, J=8.00 Hz, 3H), 3.71-4.16 (m, 16H), 3.31-3.70 (m, 44H), 2.80-2.83 (m, 2H), 2.68 (m, 2H), 2.46-2.47 (m, 10H), 2.14 (s, 9H), 2.03 (s, 9H), 1.94-1.95 (d, J=4.00 Hz, 18H).

### General Procedure for Preparation of TriGNal-TRIS-Peg2-Phosph 8c

[chemical structure]

[0405] Two batches are synthesized in parallel. To a solution of compound 6C (40.0 g, 21.1 mmol, 1.00 eq in DCM (600 mL) is added diisopropylammonium tetrazolide (3.62 g, 21.1 mmol, 1.00 eq) and compound 7c (6.37 g, 21.1 mmol, 6.71 mL, 1.00 eq) in DCM (8.00 mL) drop-wise, the mixture is stirred at 30° C. for 1 hr, then added compound 7c (3.18 g, 10.6 mmol, 3.35 mL, 0.50 eq) in DCM (8.00 mL) drop-wise, the mixture is stirred at 30° C. for 30 mins, then added compound 7c (3.18 g, 10.6 mmol, 3.35 mL, 0.50 eq) in DCM (8.00 mL) drop-wise, the mixture is stirred at 30° C. for 1.5 hrs. LCMS (EW33072-17-P1C1, Rt=0.921 min) showed the desired MS+1 is detected. LCMS (EW33072-17-P1C2, Rt=0.919 min) showed the desired MS+1 is detected. Two batches are combined for work-up. The mixture is diluted with DCM (1.20 L), washed with saturated NaHCO₃ aqueous solution (1.60 L*2), 3% DMF in H₂O (1.60 L*2), H₂O (1.60 L*3), brine (1.60 L), dried over Na₂SO₄, filtered and concentrated under reduced pressure to give a residue. The residue is purified by column chromatography (SiO₂, DCM:MeOH :TEA=100:3:2) TLC (S102, DCM MeOH=10:1, R_{f}=0.45), then concentrated under reduced pressure to give a residue. Compound 8C (76.0 g, 34.8 mmol, 82.5% yield, 96.0% purity) is obtained as white solid and confirmed via ¹HNMR: EW33072-19-P1C, 400 MHz, MeOD δ 7.13-7.15 (d, J=8.50 Hz, 2H), 6.95-6.97 (dd, J=8.38, 1.13 Hz, 2H), 5.34 (d, J=2.88 Hz, 3H), 0.09 (dd, J=11.26, 3.38 Hz, 3H), 4.64 (d, J=8.50 Hz, 3H), 3.99-4.20 (m, 12H), 3.88-3.98 (m, 5H), 3.66-3.83 (m, 20H), 3.51-3.65 (m, 17H), 3.33-3.50 (m, 9H), 2.87 (t, J=7.63 Hz, 2H), 2.76 (t, J=5.94 Hz, 2H), 2.42-2.50 (m, 10H), 2.14 (s, 9H), 2.03 (s, 9H), 1.94-1.95 (d, J=6.13 Hz, 18H), 1.24-1.26 (d, J=6.75 Hz, 6H), 1.18-1.20 (d, J=6.75 Hz, 6H)

### Example 14: Modification Motif 1

[0406] An example MTRES1 siRNA includes a combination of the following modifications:
[0407] Position 9 (from 5′ to 3′) of the sense strand is 2′ F.
[0408] If position 9 is a pyrimidine then all purines in the Sense Strand are 2′OMe, and 1-5 pyrimidines between positions 5 and 11 are 2′ F provided that there are never three 2′F modifications in a row.
[0409] If position 9 is a purine then all pyrimidines in the Sense Strand are 2′OMe, and 1-5 purines between positions 5 and 11 are 2′ F provided that there are never three 2′F modifications in a row.
[0410] Antisense strand odd-numbered positions are 2′OMe and even-numbered positions are a mixture of 2′ F, 2′ OMe and 2′ deoxy.

### Example 15: Modification Motif 2

[0411] An example MTRES1 siRNA includes a combination of the following modifications:
[0412] Position 9 (from 5′ to 3′) of the sense strand is 2′ deoxy.
[0413] Sense strand positions 5, 7 and 8 are 2′ F.
[0414] All pyrimidines in positions 10-21 are 2′ OMe, and purines are a mixture of 2′ OMe and 2′ F. Alternatively, all purines in positions 10-21 are 2′ OMe and all pyrimidines in positions 10-21 are a mixture of 2′ OMe and 2′ F.
[0415] Antisense strand odd-numbered positions are 2′OMe and even-numbered positions are a mixture of 2′ F, 2′OMe and 2′ deoxy.

[0416] While preferred embodiments of the present invention have been shown and described herein, it will be obvious to those skilled in the art that such embodiments are provided by way of example only. Numerous variations, changes, and substitutions will now occur to those skilled in the art without departing from the invention. It should be understood that various alternatives to the embodiments of the invention described herein may be employed in practicing the invention. It is intended that the following claims define the scope of the invention and that methods and compositions within the scope of these claims and their equivalents be covered thereby.

### IV. SEQUENCE INFORMATION

[0417] Some embodiments include one or more nucleic acid sequences in the following tables:

TABLE 19
Sequence Information

| SEQ ID NO: | Description |
|---|---|
| 1-1140 | MTRES1 siRNA sense strand sequences |
| 1141-2280 | MTRES1 siRNA antisense strand sequences |
| 2281-2334 | Modified MTRES1 siRNA sense strand sequences |
| 2335-2388 | Modified MTRES1 siRNA antisense strand sequences |
| 2389-2442 | Alternatively modified MTRES1 siRNA sense strand |
| | sequences |
| 2443 | Full-length human MTRES1 mRNA sequence (Ensembl |
| | Acc. ENST00000311381.8) (human RNA) |
| 2444-2452 | Modification pattern 1S to 9S |
| 2453-2460 | Modification pattern 1AS to 8AS |
| 2461 | Modification pattern ASO1 |
| 2462 | Full-length human MTRES1 mRNA sequence (Ensembl |
| | Acc. ENST00000625458.1) (human RNA) |
| 2463-2466 | Example modified siRNA sense strand sequences |
| 2467-2470 | Example modified siRNA antisense strand sequences |
| 2471-2487 | Example modified siRNA sense strand sequences |
| 2488-2504 | Example modified siRNA antisense strand sequences |
| 2505-2514 | Example modified siRNA sense strand sequences |
| 2515-2524 | Example modified siRNA antisense strand sequences |
| 2525-2547 | Modification pattern 10S to 32S |
| 2549-2549 | Modification pattern 9AS to 10AS |
| 2550-2611 | Example siRNA sense strand sequences |
| 2612-2673 | Example siRNA antisense strand sequences |

TABLE 20
Sequences

| | SEQ | | SEQ | |
|---|---|---|---|---|
| | ID | sense strand | ID | antisense strand |
| siRNA Name | NO: | sequence (5′-3′) | NO: | sequence (5′-3′) |
| siRNA 1 | 1 | GCGCAGAUAGGGGUAGCCU | 1141 | AGGCUACCCCUAUCUGCGC |
| siRNA 2 | 2 | CGCAGAUAGGGGUAGCCUG | 1142 | CAGGCUACCCCUAUCUGCG |
| siRNA 3 | 3 | GCAGAUAGGGGUAGCCUGG | 1143 | CCAGGCUACCCCUAUCUGC |
| siRNA 4 | 4 | CAGAUAGGGGUAGCCUGGA | 1144 | UCCAGGCUACCCCUAUCUG |
| siRNA 5 | 5 | AGAUAGGGGUAGCCUGGAG | 1145 | CUCCAGGCUACCCCUAUCU |
| siRNA 6 | 6 | GAUAGGGGUAGCCUGGAGG | 1146 | CCUCCAGGCUACCCCUAUC |
| siRNA 7 | 7 | AUAGGGGUAGCCUGGAGGC | 1147 | GCCUCCAGGCUACCCCUAU |
| siRNA 8 | 8 | UAGGGGUAGCCUGGAGGCC | 1148 | GGCCUCCAGGCUACCCCUA |
| siRNA 9 | 9 | AGGGGUAGCCUGGAGGCCU | 1149 | AGGCCUCCAGGCUACCCCU |
| siRNA 10 | 10 | GGGGUAGCCUGGAGGCCUG | 1150 | CAGGCCUCCAGGCUACCCC |
| siRNA 11 | 11 | GGGUAGCCUGGAGGCCUGC | 1151 | GCAGGCCUCCAGGCUACCC |
| siRNA 12 | 12 | GGUAGCCUGGAGGCCUGCA | 1152 | UGCAGGCCUCCAGGCUACC |
| siRNA 13 | 13 | GUAGCCUGGAGGCCUGCAG | 1153 | CUGCAGGCCUCCAGGCUAC |
| siRNA 14 | 14 | UAGCCUGGAGGCCUGCAGU | 1154 | ACUGCAGGCCUCCAGGCUA |
| siRNA 15 | 15 | AGCCUGGAGGCCUGCAGUC | 1155 | GACUGCAGGCCUCCAGGCU |
| siRNA 16 | 16 | GCCUGGAGGCCUGCAGUCC | 1156 | GGACUGCAGGCCUCCAGGC |
| siRNA 17 | 17 | CCUGGAGGCCUGCAGUCCG | 1157 | CGGACUGCAGGCCUCCAGG |
| siRNA 18 | 18 | CUGGAGGCCUGCAGUCCGC | 1158 | GCGGACUGCAGGCCUCCAG |
| siRNA 19 | 19 | UGGAGGCCUGCAGUCCGCG | 1159 | CGCGGACUGCAGGCCUCCA |
| siRNA 20 | 20 | GGAGGCCUGCAGUCCGCGC | 1160 | GCGCGGACUGCAGGCCUCC |
| siRNA 21 | 21 | GAGGCCUGCAGUCCGCGCG | 1161 | CGCGCGGACUGCAGGCCUC |
| siRNA 22 | 22 | AGGCCUGCAGUCCGCGCGG | 1162 | CCGCGCGGACUGCAGGCCU |
| siRNA 23 | 23 | GGCCUGCAGUCCGCGCGGC | 1163 | GCCGCGCGGACUGCAGGCC |
| siRNA 24 | 24 | GCCUGCAGUCCGCGCGGCC | 1164 | GGCCGCGCGGACUGCAGGC |
| siRNA 25 | 25 | CCUGCAGUCCGCGCGGCCG | 1165 | CGGCCGCGCGGACUGCAGG |
| siRNA 26 | 26 | CUGCAGUCCGCGCGGCCGC | 1166 | GCGGCCGCGCGGACUGCAG |
| siRNA 27 | 27 | UGCAGUCCGCGCGGCCGCG | 1167 | CGCGGCCGCGCGGACUGCA |
| siRNA 28 | 28 | GCAGUCCGCGCGGCCGCGG | 1168 | CCGCGGCCGCGCGGACUGC |
| siRNA 29 | 29 | CAGUCCGCGCGGCCGCGGG | 1169 | CCCGCGGCCGCGCGGACUG |
| siRNA 30 | 30 | AGUCCGCGCGGCCGCGGGG | 1170 | CCCCGCGGCCGCGCGGACU |
| siRNA 31 | 31 | GUCCGCGCGGCCGCGGGGA | 1171 | UCCCCGCGGCCGCGCGGAC |
| siRNA 32 | 32 | UCCGCGCGGCCGCGGGGAG | 1172 | CUCCCCGCGGCCGCGCGGA |
| siRNA 33 | 33 | CCGCGCGGCCGCGGGGAGG | 1173 | CCUCCCCGCGGCCGCGCGG |
| siRNA 34 | 34 | CGCGCGGCCGCGGGGAGGG | 1174 | CCCUCCCCGCGGCCGCGCG |
| siRNA 35 | 35 | GCGCGGCCGCGGGGAGGGA | 1175 | UCCCUCCCCGCGGCCGCGC |
| siRNA 36 | 36 | CGCGGCCGCGGGGAGGGAC | 1176 | GUCCCUCCCCGCGGCCGCG |
| siRNA 37 | 37 | GCGGCCGCGGGGAGGGACG | 1177 | CGUCCCUCCCCGCGGCCGC |
| siRNA 38 | 38 | CGGCCGCGGGGAGGGACGA | 1178 | UCGUCCCUCCCCGCGGCCG |
| siRNA 39 | 39 | GGCCGCGGGGAGGGACGAG | 1179 | CUCGUCCCUCCCCGCGGCC |
| siRNA 40 | 40 | GCCGCGGGGAGGGACGAGA | 1180 | UCUCGUCCCUCCCCGCGGC |
| siRNA 41 | 41 | CCGCGGGGAGGGACGAGAG | 1181 | CUCUCGUCCCUCCCCGCGG |
| siRNA 42 | 42 | CGCGGGGAGGGACGAGAGG | 1182 | CCUCUCGUCCCUCCCCGCG |
| siRNA 43 | 43 | GCGGGGAGGGACGAGAGGG | 1183 | CCCUCUCGUCCCUCCCCGC |
| siRNA 44 | 44 | CGGGGAGGGACGAGAGGGC | 1184 | GCCCUCUCGUCCCUCCCCG |
| siRNA 45 | 45 | GGGGAGGGACGAGAGGGCC | 1185 | GGCCCUCUCGUCCCUCCCC |
| siRNA 46 | 46 | GGGAGGGACGAGAGGGCCU | 1186 | AGGCCCUCUCGUCCCUCCC |
| siRNA 47 | 47 | GGAGGGACGAGAGGGCCUG | 1187 | CAGGCCCUCUCGUCCCUCC |
| siRNA 48 | 48 | GAGGGACGAGAGGGCCUGA | 1188 | UCAGGCCCUCUCGUCCCUC |
| siRNA 49 | 49 | AGGGACGAGAGGGCCUGAC | 1189 | GUCAGGCCCUCUCGUCCCU |
| siRNA 50 | 50 | GGGACGAGAGGGCCUGACG | 1190 | CGUCAGGCCCUCUCGUCCC |
| siRNA 51 | 51 | GGACGAGAGGGCCUGACGU | 1191 | ACGUCAGGCCCUCUCGUCC |
| siRNA 52 | 52 | GACGAGAGGGCCUGACGUA | 1192 | UACGUCAGGCCCUCUCGUC |
| siRNA 53 | 53 | ACGAGAGGGCCUGACGUAC | 1193 | GUACGUCAGGCCCUCUCGU |
| siRNA 54 | 54 | CGAGAGGGCCUGACGUACA | 1194 | UGUACGUCAGGCCCUCUCG |
| siRNA 55 | 55 | GAGAGGGCCUGACGUACAG | 1195 | CUGUACGUCAGGCCCUCUC |
| siRNA 56 | 56 | AGAGGGCCUGACGUACAGA | 1196 | UCUGUACGUCAGGCCCUCU |
| siRNA 57 | 57 | GAGGGCCUGACGUACAGAU | 1197 | AUCUGUACGUCAGGCCCUC |
| siRNA 58 | 58 | AGGGCCUGACGUACAGAUU | 1198 | AAUCUGUACGUCAGGCCCU |
| siRNA 59 | 59 | GGGCCUGACGUACAGAUUA | 1199 | UAAUCUGUACGUCAGGCCC |
| siRNA 60 | 60 | GGCCUGACGUACAGAUUAU | 1200 | AUAAUCUGUACGUCAGGCC |
| siRNA 61 | 61 | GCCUGACGUACAGAUUAUA | 1201 | UAUAAUCUGUACGUCAGGC |
| siRNA 62 | 62 | CCUGACGUACAGAUUAUAA | 1202 | UUAUAAUCUGUACGUCAGG |
| siRNA 63 | 63 | CUGACGUACAGAUUAUAAG | 1203 | CUUAUAAUCUGUACGUCAG |
| siRNA 64 | 64 | UGACGUACAGAUUAUAAGC | 1204 | GCUUAUAAUCUGUACGUCA |
| siRNA 65 | 65 | GACGUACAGAUUAUAAGCG | 1205 | CGCUUAUAAUCUGUACGUC |
| siRNA 66 | 66 | ACGUACAGAUUAUAAGCGC | 1206 | GCGCUUAUAAUCUGUACGU |
| siRNA 67 | 67 | CGUACAGAUUAUAAGCGCC | 1207 | GGCGCUUAUAAUCUGUACG |
| siRNA 68 | 68 | GUACAGAUUAUAAGCGCCA | 1208 | UGGCGCUUAUAAUCUGUAC |
| siRNA 69 | 69 | UACAGAUUAUAAGCGCCAU | 1209 | AUGGCGCUUAUAAUCUGUA |
| siRNA 70 | 70 | ACAGAUUAUAAGCGCCAUG | 1210 | CAUGGCGCUUAUAAUCUGU |
| siRNA 71 | 71 | CAGAUUAUAAGCGCCAUGG | 1211 | CCAUGGCGCUUAUAAUCUG |
| siRNA 72 | 72 | AGAUUAUAAGCGCCAUGGC | 1212 | GCCAUGGCGCUUAUAAUCU |
| siRNA 73 | 73 | GAUUAUAAGCGCCAUGGCU | 1213 | AGCCAUGGCGCUUAUAAUC |
| siRNA 74 | 74 | AUUAUAAGCGCCAUGGCUA | 1214 | UAGCCAUGGCGCUUAUAAU |
| siRNA 75 | 75 | UUAUAAGCGCCAUGGCUAU | 1215 | AUAGCCAUGGCGCUUAUAA |
| siRNA 76 | 76 | UAUAAGCGCCAUGGCUAUG | 1216 | CAUAGCCAUGGCGCUUAUA |
| siRNA 77 | 77 | AUAAGCGCCAUGGCUAUGG | 1217 | CCAUAGCCAUGGCGCUUAU |
| siRNA 78 | 78 | UAAGCGCCAUGGCUAUGGC | 1218 | GCCAUAGCCAUGGCGCUUA |
| siRNA 79 | 79 | AAGCGCCAUGGCUAUGGCU | 1219 | AGCCAUAGCCAUGGCGCUU |
| siRNA 80 | 80 | AGCGCCAUGGCUAUGGCUA | 1220 | UAGCCAUAGCCAUGGCGCU |
| siRNA 81 | 81 | GCGCCAUGGCUAUGGCUAG | 1221 | CUAGCCAUAGCCAUGGCGC |
| siRNA 82 | 82 | CGCCAUGGCUAUGGCUAGU | 1222 | ACUAGCCAUAGCCAUGGCG |
| siRNA 83 | 83 | GCCAUGGCUAUGGCUAGUG | 1223 | CACUAGCCAUAGCCAUGGC |
| siRNA 84 | 84 | CCAUGGCUAUGGCUAGUGU | 1224 | ACACUAGCCAUAGCCAUGG |
| siRNA 85 | 85 | CAUGGCUAUGGCUAGUGUU | 1225 | AACACUAGCCAUAGCCAUG |
| siRNA 86 | 86 | AUGGCUAUGGCUAGUGUUA | 1226 | UAACACUAGCCAUAGCCAU |
| siRNA 87 | 87 | UGGCUAUGGCUAGUGUUAA | 1227 | UUAACACUAGCCAUAGCCA |
| siRNA 88 | 88 | GGCUAUGGCUAGUGUUAAA | 1228 | UUUAACACUAGCCAUAGCC |
| siRNA 89 | 89 | GCUAUGGCUAGUGUUAAAU | 1229 | AUUUAACACUAGCCAUAGC |
| siRNA 90 | 90 | CUAUGGCUAGUGUUAAAUU | 1230 | AAUUUAACACUAGCCAUAG |
| siRNA 91 | 91 | UAUGGCUAGUGUUAAAUUG | 1231 | CAAUUUAACACUAGCCAUA |
| siRNA 92 | 92 | AUGGCUAGUGUUAAAUUGC | 1232 | GCAAUUUAACACUAGCCAU |
| siRNA 93 | 93 | UGGCUAGUGUUAAAUUGCU | 1233 | AGCAAUUUAACACUAGCCA |
| siRNA 94 | 94 | GGCUAGUGUUAAAUUGCUU | 1234 | AAGCAAUUUAACACUAGCC |
| siRNA 95 | 95 | GCUAGUGUUAAAUUGCUUG | 1235 | CAAGCAAUUUAACACUAGC |
| siRNA 96 | 96 | CUAGUGUUAAAUUGCUUGC | 1236 | GCAAGCAAUUUAACACUAG |
| siRNA 97 | 97 | UAGUGUUAAAUUGCUUGCC | 1237 | GGCAAGCAAUUUAACACUA |
| siRNA 98 | 98 | AGUGUUAAAUUGCUUGCCG | 1238 | CGGCAAGCAAUUUAACACU |
| siRNA 99 | 99 | GUGUUAAAUUGCUUGCCGG | 1239 | CCGGCAAGCAAUUUAACAC |
| siRNA 100 | 100 | UGUUAAAUUGCUUGCCGGU | 1240 | ACCGGCAAGCAAUUUAACA |
| siRNA 101 | 101 | GUUAAAUUGCUUGCCGGUG | 1241 | CACCGGCAAGCAAUUUAAC |
| siRNA 102 | 102 | UUAAAUUGCUUGCCGGUGU | 1242 | ACACCGGCAAGCAAUUUAA |
| siRNA 103 | 103 | UAAAUUGCUUGCCGGUGUU | 1243 | AACACCGGCAAGCAAUUUA |
| siRNA 104 | 104 | AAAUUGCUUGCCGGUGUUU | 1244 | AAACACCGGCAAGCAAUUU |
| siRNA 105 | 105 | AAUUGCUUGCCGGUGUUUU | 1245 | AAAACACCGGCAAGCAAUU |
| siRNA 106 | 106 | AUUGCUUGCCGGUGUUUUA | 1246 | UAAAACACCGGCAAGCAAU |
| siRNA 107 | 107 | UUGCUUGCCGGUGUUUUAA | 1247 | UUAAAACACCGGCAAGCAA |
| siRNA 108 | 108 | UGCUUGCCGGUGUUUUAAG | 1248 | CUUAAAACACCGGCAAGCA |
| siRNA 109 | 109 | GCUUGCCGGUGUUUUAAGA | 1249 | UCUUAAAACACCGGCAAGC |
| siRNA 110 | 110 | CUUGCCGGUGUUUUAAGAA | 1250 | UUCUUAAAACACCGGCAAG |
| siRNA 111 | 111 | UUGCCGGUGUUUUAAGAAA | 1251 | UUUCUUAAAACACCGGCAA |
| siRNA 112 | 112 | UGCCGGUGUUUUAAGAAAG | 1252 | CUUUCUUAAAACACCGGCA |
| siRNA 113 | 113 | GCCGGUGUUUUAAGAAAGC | 1253 | GCUUUCUUAAAACACCGGC |
| siRNA 114 | 114 | CCGGUGUUUUAAGAAAGCC | 1254 | GGCUUUCUUAAAACACCGG |
| siRNA 115 | 115 | CGGUGUUUUAAGAAAGCCA | 1255 | UGGCUUUCUUAAAACACCG |
| siRNA 116 | 116 | GGUGUUUUAAGAAAGCCAG | 1256 | CUGGCUUUCUUAAAACACC |
| siRNA 117 | 117 | GUGUUUUAAGAAAGCCAGA | 1257 | UCUGGCUUUCUUAAAACAC |
| siRNA 118 | 118 | UGUUUUAAGAAAGCCAGAU | 1258 | AUCUGGCUUUCUUAAAACA |
| siRNA 119 | 119 | GUUUUAAGAAAGCCAGAUG | 1259 | CAUCUGGCUUUCUUAAAAC |
| siRNA 120 | 120 | UUUUAAGAAAGCCAGAUGC | 1260 | GCAUCUGGCUUUCUUAAAA |
| siRNA 121 | 121 | UUUAAGAAAGCCAGAUGCC | 1261 | GGCAUCUGGCUUUCUUAAA |
| SIRNA 122 | 122 | UUAAGAAAGCCAGAUGCCU | 1262 | AGGCAUCUGGCUUUCUUAA |
| siRNA 123 | 123 | UAAGAAAGCCAGAUGCCUG | 1263 | CAGGCAUCUGGCUUUCUUA |
| siRNA 124 | 124 | AAGAAAGCCAGAUGCCUGG | 1264 | CCAGGCAUCUGGCUUUCUU |
| siRNA 125 | 125 | AGAAAGCCAGAUGCCUGGA | 1265 | UCCAGGCAUCUGGCUUUCU |
| siRNA 126 | 126 | GAAAGCCAGAUGCCUGGAU | 1266 | AUCCAGGCAUCUGGCUUUC |
| siRNA 127 | 127 | AAAGCCAGAUGCCUGGAUU | 1267 | AAUCCAGGCAUCUGGCUUU |
| siRNA 128 | 128 | AAGCCAGAUGCCUGGAUUG | 1268 | CAAUCCAGGCAUCUGGCUU |
| siRNA 129 | 129 | AGCCAGAUGCCUGGAUUGG | 1269 | CCAAUCCAGGCAUCUGGCU |
| siRNA 130 | 130 | GCCAGAUGCCUGGAUUGGA | 1270 | UCCAAUCCAGGCAUCUGGC |
| siRNA 131 | 131 | CCAGAUGCCUGGAUUGGAC | 1271 | GUCCAAUCCAGGCAUCUGG |
| siRNA 132 | 132 | CAGAUGCCUGGAUUGGACU | 1272 | AGUCCAAUCCAGGCAUCUG |
| siRNA 133 | 133 | AGAUGCCUGGAUUGGACUC | 1273 | GAGUCCAAUCCAGGCAUCU |
| siRNA 134 | 134 | GAUGCCUGGAUUGGACUCU | 1274 | AGAGUCCAAUCCAGGCAUC |
| siRNA 135 | 135 | AUGCCUGGAUUGGACUCUG | 1275 | CAGAGUCCAAUCCAGGCAU |
| siRNA 136 | 136 | UGCCUGGAUUGGACUCUGG | 1276 | CCAGAGUCCAAUCCAGGCA |
| siRNA 137 | 137 | GCCUGGAUUGGACUCUGGG | 1277 | CCCAGAGUCCAAUCCAGGC |
| siRNA 138 | 138 | CCUGGAUUGGACUCUGGGG | 1278 | CCCCAGAGUCCAAUCCAGG |
| siRNA 139 | 139 | CUGGAUUGGACUCUGGGGU | 1279 | ACCCCAGAGUCCAAUCCAG |
| siRNA 140 | 140 | UGGAUUGGACUCUGGGGUG | 1280 | CACCCCAGAGUCCAAUCCA |
| siRNA 141 | 141 | GGAUUGGACUCUGGGGUGU | 1281 | ACACCCCAGAGUCCAAUCC |
| siRNA 142 | 142 | GAUUGGACUCUGGGGUGUU | 1282 | AACACCCCAGAGUCCAAUC |
| siRNA 143 | 143 | AUUGGACUCUGGGGUGUUC | 1283 | GAACACCCCAGAGUCCAAU |
| siRNA 144 | 144 | UUGGACUCUGGGGUGUUCU | 1284 | AGAACACCCCAGAGUCCAA |
| siRNA 145 | 145 | UGGACUCUGGGGUGUUCUC | 1285 | GAGAACACCCCAGAGUCCA |
| siRNA 146 | 146 | GGACUCUGGGGUGUUCUCC | 1286 | GGAGAACACCCCAGAGUCC |
| siRNA 147 | 147 | GACUCUGGGGUGUUCUCCG | 1287 | CGGAGAACACCCCAGAGUC |
| siRNA 148 | 148 | ACUCUGGGGUGUUCUCCGA | 1288 | UCGGAGAACACCCCAGAGU |
| siRNA 149 | 149 | CUCUGGGGUGUUCUCCGAG | 1289 | CUCGGAGAACACCCCAGAG |
| siRNA 150 | 150 | UCUGGGGUGUUCUCCGAGG | 1290 | CCUCGGAGAACACCCCAGA |
| siRNA 151 | 151 | CUGGGGUGUUCUCCGAGGG | 1291 | CCCUCGGAGAACACCCCAG |
| siRNA 152 | 152 | UGGGGUGUUCUCCGAGGGA | 1292 | UCCCUCGGAGAACACCCCA |
| siRNA 153 | 153 | GGGGUGUUCUCCGAGGGAC | 1293 | GUCCCUCGGAGAACACCCC |
| siRNA 154 | 154 | GGGUGUUCUCCGAGGGACA | 1294 | UGUCCCUCGGAGAACACCC |
| siRNA 155 | 155 | GGUGUUCUCCGAGGGACAC | 1295 | GUGUCCCUCGGAGAACACC |
| siRNA 156 | 156 | GUGUUCUCCGAGGGACACC | 1296 | GGUGUCCCUCGGAGAACAC |
| siRNA 157 | 157 | UGUUCUCCGAGGGACACCU | 1297 | AGGUGUCCCUCGGAGAACA |
| siRNA 158 | 158 | GUUCUCCGAGGGACACCUU | 1298 | AAGGUGUCCCUCGGAGAAC |
| siRNA 159 | 159 | UUCUCCGAGGGACACCUUC | 1299 | GAAGGUGUCCCUCGGAGAA |
| siRNA 160 | 160 | UCUCCGAGGGACACCUUCA | 1300 | UGAAGGUGUCCCUCGGAGA |
| siRNA 161 | 161 | CUCCGAGGGACACCUUCAU | 1301 | AUGAAGGUGUCCCUCGGAG |
| siRNA 162 | 162 | UCCGAGGGACACCUUCAUC | 1302 | GAUGAAGGUGUCCCUCGGA |
| siRNA 163 | 163 | CCGAGGGACACCUUCAUCA | 1303 | UGAUGAAGGUGUCCCUCGG |
| siRNA 164 | 164 | CGAGGGACACCUUCAUCAU | 1304 | AUGAUGAAGGUGUCCCUCG |
| siRNA 165 | 165 | GAGGGACACCUUCAUCAUA | 1305 | UAUGAUGAAGGUGUCCCUC |
| siRNA 166 | 166 | AGGGACACCUUCAUCAUAC | 1306 | GUAUGAUGAAGGUGUCCCU |
| siRNA 167 | 167 | GGGACACCUUCAUCAUACA | 1307 | UGUAUGAUGAAGGUGUCCC |
| siRNA 168 | 168 | GGACACCUUCAUCAUACAA | 1308 | UUGUAUGAUGAAGGUGUCC |
| siRNA 169 | 169 | GACACCUUCAUCAUACAAA | 1309 | UUUGUAUGAUGAAGGUGUC |
| siRNA 170 | 170 | ACACCUUCAUCAUACAAAC | 1310 | GUUUGUAUGAUGAAGGUGU |
| siRNA 171 | 171 | CACCUUCAUCAUACAAACU | 1311 | AGUUUGUAUGAUGAAGGUG |
| siRNA 172 | 172 | ACCUUCAUCAUACAAACUC | 1312 | GAGUUUGUAUGAUGAAGGU |
| siRNA 173 | 173 | CCUUCAUCAUACAAACUCU | 1313 | AGAGUUUGUAUGAUGAAGG |
| siRNA 174 | 174 | CUUCAUCAUACAAACUCUG | 1314 | CAGAGUUUGUAUGAUGAAG |
| siRNA 175 | 175 | UUCAUCAUACAAACUCUGU | 1315 | ACAGAGUUUGUAUGAUGAA |
| siRNA 176 | 176 | UCAUCAUACAAACUCUGUA | 1316 | UACAGAGUUUGUAUGAUGA |
| siRNA 177 | 177 | CAUCAUACAAACUCUGUAC | 1317 | GUACAGAGUUUGUAUGAUG |
| siRNA 178 | 178 | AUCAUACAAACUCUGUACU | 1318 | AGUACAGAGUUUGUAUGAU |
| siRNA 179 | 179 | UCAUACAAACUCUGUACUU | 1319 | AAGUACAGAGUUUGUAUGA |
| siRNA 180 | 180 | CAUACAAACUCUGUACUUC | 1320 | GAAGUACAGAGUUUGUAUG |
| siRNA 181 | 181 | AUACAAACUCUGUACUUCC | 1321 | GGAAGUACAGAGUUUGUAU |
| siRNA 182 | 182 | UACAAACUCUGUACUUCCU | 1322 | AGGAAGUACAGAGUUUGUA |
| siRNA 183 | 183 | ACAAACUCUGUACUUCCUG | 1323 | CAGGAAGUACAGAGUUUGU |
| siRNA 184 | 184 | CAAACUCUGUACUUCCUGG | 1324 | CCAGGAAGUACAGAGUUUG |
| siRNA 185 | 185 | AAACUCUGUACUUCCUGGA | 1325 | UCCAGGAAGUACAGAGUUU |
| siRNA 186 | 186 | AACUCUGUACUUCCUGGAA | 1326 | UUCCAGGAAGUACAGAGUU |
| siRNA 187 | 187 | ACUCUGUACUUCCUGGAAU | 1327 | AUUCCAGGAAGUACAGAGU |
| siRNA 188 | 188 | CUCUGUACUUCCUGGAAUC | 1328 | GAUUCCAGGAAGUACAGAG |
| siRNA 189 | 189 | UCUGUACUUCCUGGAAUCG | 1329 | CGAUUCCAGGAAGUACAGA |
| siRNA 190 | 190 | CUGUACUUCCUGGAAUCGA | 1330 | UCGAUUCCAGGAAGUACAG |
| siRNA 191 | 191 | UGUACUUCCUGGAAUCGAU | 1331 | AUCGAUUCCAGGAAGUACA |
| siRNA 192 | 192 | GUACUUCCUGGAAUCGAUA | 1332 | UAUCGAUUCCAGGAAGUAC |
| siRNA 193 | 193 | UACUUCCUGGAAUCGAUAC | 1333 | GUAUCGAUUCCAGGAAGUA |
| siRNA 194 | 194 | ACUUCCUGGAAUCGAUACU | 1334 | AGUAUCGAUUCCAGGAAGU |
| siRNA 195 | 195 | CUUCCUGGAAUCGAUACUU | 1335 | AAGUAUCGAUUCCAGGAAG |
| siRNA 196 | 196 | UUCCUGGAAUCGAUACUUG | 1336 | CAAGUAUCGAUUCCAGGAA |
| siRNA 197 | 197 | UCCUGGAAUCGAUACUUGU | 1337 | ACAAGUAUCGAUUCCAGGA |
| siRNA 198 | 198 | CCUGGAAUCGAUACUUGUA | 1338 | UACAAGUAUCGAUUCCAGG |
| siRNA 199 | 199 | CUGGAAUCGAUACUUGUAU | 1339 | AUACAAGUAUCGAUUCCAG |
| siRNA 200 | 200 | UGGAAUCGAUACUUGUAUU | 1340 | AAUACAAGUAUCGAUUCCA |
| siRNA 201 | 201 | GGAAUCGAUACUUGUAUUU | 1341 | AAAUACAAGUAUCGAUUCC |
| siRNA 202 | 202 | GAAUCGAUACUUGUAUUUU | 1342 | AAAAUACAAGUAUCGAUUC |
| siRNA 203 | 203 | AAUCGAUACUUGUAUUUUU | 1343 | AAAAAUACAAGUAUCGAUU |
| siRNA 204 | 204 | AUCGAUACUUGUAUUUUUC | 1344 | GAAAAAUACAAGUAUCGAU |
| siRNA 205 | 205 | UCGAUACUUGUAUUUUUCU | 1345 | AGAAAAAUACAAGUAUCGA |
| siRNA 206 | 206 | CGAUACUUGUAUUUUUCUA | 1346 | UAGAAAAAUACAAGUAUCG |
| siRNA 207 | 207 | GAUACUUGUAUUUUUCUAG | 1347 | CUAGAAAAAUACAAGUAUC |
| siRNA 208 | 208 | AUACUUGUAUUUUUCUAGU | 1348 | ACUAGAAAAAUACAAGUAU |
| siRNA 209 | 209 | UACUUGUAUUUUUCUAGUA | 1349 | UACUAGAAAAAUACAAGUA |
| siRNA 210 | 210 | ACUUGUAUUUUUCUAGUAC | 1350 | GUACUAGAAAAAUACAAGU |
| siRNA 211 | 211 | CUUGUAUUUUUCUAGUACC | 1351 | GGUACUAGAAAAAUACAAG |
| siRNA 212 | 212 | UUGUAUUUUUCUAGUACCA | 1352 | UGGUACUAGAAAAAUACAA |
| siRNA 213 | 213 | UGUAUUUUUCUAGUACCAA | 1353 | UUGGUACUAGAAAAAUACA |
| siRNA 214 | 214 | GUAUUUUUCUAGUACCAAG | 1354 | CUUGGUACUAGAAAAAUAC |
| siRNA 215 | 215 | UAUUUUUCUAGUACCAAGU | 1355 | ACUUGGUACUAGAAAAAUA |
| siRNA 216 | 216 | AUUUUUCUAGUACCAAGUU | 1356 | AACUUGGUACUAGAAAAAU |
| siRNA 217 | 217 | UUUUUCUAGUACCAAGUUA | 1357 | UAACUUGGUACUAGAAAAA |
| siRNA 218 | 218 | UUUUCUAGUACCAAGUUAC | 1358 | GUAACUUGGUACUAGAAAA |
| siRNA 219 | 219 | UUUCUAGUACCAAGUUACG | 1359 | CGUAACUUGGUACUAGAAA |
| siRNA 220 | 220 | UUCUAGUACCAAGUUACGU | 1360 | ACGUAACUUGGUACUAGAA |
| siRNA 221 | 221 | UCUAGUACCAAGUUACGUG | 1361 | CACGUAACUUGGUACUAGA |
| siRNA 222 | 222 | CUAGUACCAAGUUACGUGC | 1362 | GCACGUAACUUGGUACUAG |
| siRNA 223 | 223 | UAGUACCAAGUUACGUGCA | 1363 | UGCACGUAACUUGGUACUA |
| siRNA 224 | 224 | AGUACCAAGUUACGUGCAC | 1364 | GUGCACGUAACUUGGUACU |
| siRNA 225 | 225 | GUACCAAGUUACGUGCACC | 1365 | GGUGCACGUAACUUGGUAC |
| siRNA 226 | 226 | UACCAAGUUACGUGCACCA | 1366 | UGGUGCACGUAACUUGGUA |
| siRNA 227 | 227 | ACCAAGUUACGUGCACCAA | 1367 | UUGGUGCACGUAACUUGGU |
| siRNA 228 | 228 | CCAAGUUACGUGCACCAAA | 1368 | UUUGGUGCACGUAACUUGG |
| siRNA 229 | 229 | CAAGUUACGUGCACCAAAU | 1369 | AUUUGGUGCACGUAACUUG |
| siRNA 230 | 230 | AAGUUACGUGCACCAAAUU | 1370 | AAUUUGGUGCACGUAACUU |
| siRNA 231 | 231 | AGUUACGUGCACCAAAUUA | 1371 | UAAUUUGGUGCACGUAACU |
| siRNA 232 | 232 | GUUACGUGCACCAAAUUAU | 1372 | AUAAUUUGGUGCACGUAAC |
| siRNA 233 | 233 | UUACGUGCACCAAAUUAUA | 1373 | UAUAAUUUGGUGCACGUAA |
| siRNA 234 | 234 | UACGUGCACCAAAUUAUAA | 1374 | UUAUAAUUUGGUGCACGUA |
| siRNA 235 | 235 | ACGUGCACCAAAUUAUAAA | 1375 | UUUAUAAUUUGGUGCACGU |
| siRNA 236 | 236 | CGUGCACCAAAUUAUAAAA | 1376 | UUUUAUAAUUUGGUGCACG |
| siRNA 237 | 237 | GUGCACCAAAUUAUAAAAC | 1377 | GUUUUAUAAUUUGGUGCAC |
| siRNA 238 | 238 | UGCACCAAAUUAUAAAACA | 1378 | UGUUUUAUAAUUUGGUGCA |
| siRNA 239 | 239 | GCACCAAAUUAUAAAACAC | 1379 | GUGUUUUAUAAUUUGGUGC |
| siRNA 240 | 240 | CACCAAAUUAUAAAACACU | 1380 | AGUGUUUUAUAAUUUGGUG |
| siRNA 241 | 241 | ACCAAAUUAUAAAACACUU | 1381 | AAGUGUUUUAUAAUUUGGU |
| siRNA 242 | 242 | CCAAAUUAUAAAACACUUU | 1382 | AAAGUGUUUUAUAAUUUGG |
| siRNA 243 | 243 | CAAAUUAUAAAACACUUUU | 1383 | AAAAGUGUUUUAUAAUUUG |
| siRNA 244 | 244 | AAAUUAUAAAACACUUUUU | 1384 | AAAAAGUGUUUUAUAAUUU |
| siRNA 245 | 245 | AAUUAUAAAACACUUUUUU | 1385 | AAAAAAGUGUUUUAUAAUU |
| siRNA 246 | 246 | AUUAUAAAACACUUUUUUA | 1386 | UAAAAAAGUGUUUUAUAAU |
| siRNA 247 | 247 | UUAUAAAACACUUUUUUAU | 1387 | AUAAAAAAGUGUUUUAUAA |
| siRNA 248 | 248 | UAUAAAACACUUUUUUAUA | 1388 | UAUAAAAAAGUGUUUUAUA |
| siRNA 249 | 249 | AUAAAACACUUUUUUAUAA | 1389 | UUAUAAAAAAGUGUUUUAU |
| siRNA 250 | 250 | UAAAACACUUUUUUAUAAU | 1390 | AUUAUAAAAAAGUGUUUUA |
| siRNA 251 | 251 | AAAACACUUUUUUAUAAUA | 1391 | UAUUAUAAAAAAGUGUUUU |
| siRNA 252 | 252 | AAACACUUUUUUAUAAUAU | 1392 | AUAUUAUAAAAAAGUGUUU |
| siRNA 253 | 253 | AACACUUUUUUAUAAUAUU | 1393 | AAUAUUAUAAAAAAGUGUU |
| siRNA 254 | 254 | ACACUUUUUUAUAAUAUUU | 1394 | AAAUAUUAUAAAAAAGUGU |
| siRNA 255 | 255 | CACUUUUUUAUAAUAUUUU | 1395 | AAAAUAUUAUAAAAAAGUG |
| siRNA 256 | 256 | ACUUUUUUAUAAUAUUUUC | 1396 | GAAAAUAUUAUAAAAAAGU |
| siRNA 257 | 257 | CUUUUUUAUAAUAUUUUCU | 1397 | AGAAAAUAUUAUAAAAAAG |
| siRNA 258 | 258 | UUUUUUAUAAUAUUUUCUC | 1398 | GAGAAAAUAUUAUAAAAAA |
| siRNA 259 | 259 | UUUUUAUAAUAUUUUCUCA | 1399 | UGAGAAAAUAUUAUAAAAA |
| siRNA 260 | 260 | UUUUAUAAUAUUUUCUCAC | 1400 | GUGAGAAAAUAUUAUAAAA |
| siRNA 261 | 261 | UUUAUAAUAUUUUCUCACU | 1401 | AGUGAGAAAAUAUUAUAAA |
| siRNA 262 | 262 | UUAUAAUAUUUUCUCACUG | 1402 | CAGUGAGAAAAUAUUAUAA |
| siRNA 263 | 263 | UAUAAUAUUUUCUCACUGA | 1403 | UCAGUGAGAAAAUAUUAUA |
| siRNA 264 | 264 | AUAAUAUUUUCUCACUGAG | 1404 | CUCAGUGAGAAAAUAUUAU |
| siRNA 265 | 265 | UAAUAUUUUCUCACUGAGA | 1405 | UCUCAGUGAGAAAAUAUUA |
| siRNA 266 | 266 | AAUAUUUUCUCACUGAGAC | 1406 | GUCUCAGUGAGAAAAUAUU |
| siRNA 267 | 267 | AUAUUUUCUCACUGAGACU | 1407 | AGUCUCAGUGAGAAAAUAU |
| siRNA 268 | 268 | UAUUUUCUCACUGAGACUC | 1408 | GAGUCUCAGUGAGAAAAUA |
| siRNA 269 | 269 | AUUUUCUCACUGAGACUCC | 1409 | GGAGUCUCAGUGAGAAAAU |
| siRNA 270 | 270 | UUUUCUCACUGAGACUCCC | 1410 | GGGAGUCUCAGUGAGAAAA |
| siRNA 271 | 271 | UUUCUCACUGAGACUCCCA | 1411 | UGGGAGUCUCAGUGAGAAA |
| siRNA 272 | 272 | UUCUCACUGAGACUCCCAG | 1412 | CUGGGAGUCUCAGUGAGAA |
| siRNA 273 | 273 | UCUCACUGAGACUCCCAGG | 1413 | CCUGGGAGUCUCAGUGAGA |
| siRNA 274 | 274 | CUCACUGAGACUCCCAGGG | 1414 | CCCUGGGAGUCUCAGUGAG |
| siRNA 275 | 275 | UCACUGAGACUCCCAGGGC | 1415 | GCCCUGGGAGUCUCAGUGA |
| siRNA 276 | 276 | CACUGAGACUCCCAGGGCU | 1416 | AGCCCUGGGAGUCUCAGUG |
| siRNA 277 | 277 | ACUGAGACUCCCAGGGCUU | 1417 | AAGCCCUGGGAGUCUCAGU |
| siRNA 278 | 278 | CUGAGACUCCCAGGGCUUU | 1418 | AAAGCCCUGGGAGUCUCAG |
| siRNA 279 | 279 | UGAGACUCCCAGGGCUUUU | 1419 | AAAAGCCCUGGGAGUCUCA |
| siRNA 280 | 280 | GAGACUCCCAGGGCUUUUA | 1420 | UAAAAGCCCUGGGAGUCUC |
| siRNA 281 | 281 | AGACUCCCAGGGCUUUUAC | 1421 | GUAAAAGCCCUGGGAGUCU |
| siRNA 282 | 282 | GACUCCCAGGGCUUUUACU | 1422 | AGUAAAAGCCCUGGGAGUC |
| siRNA 283 | 283 | ACUCCCAGGGCUUUUACUA | 1423 | UAGUAAAAGCCCUGGGAGU |
| siRNA 284 | 284 | CUCCCAGGGCUUUUACUAU | 1424 | AUAGUAAAAGCCCUGGGAG |
| siRNA 285 | 285 | UCCCAGGGCUUUUACUAUC | 1425 | GAUAGUAAAAGCCCUGGGA |
| siRNA 286 | 286 | CCCAGGGCUUUUACUAUCU | 1426 | AGAUAGUAAAAGCCCUGGG |
| siRNA 287 | 287 | CCAGGGCUUUUACUAUCUC | 1427 | GAGAUAGUAAAAGCCCUGG |
| siRNA 288 | 288 | CAGGGCUUUUACUAUCUCC | 1428 | GGAGAUAGUAAAAGCCCUG |
| siRNA 289 | 289 | AGGGCUUUUACUAUCUCCA | 1429 | UGGAGAUAGUAAAAGCCCU |
| siRNA 290 | 290 | GGGCUUUUACUAUCUCCAG | 1430 | CUGGAGAUAGUAAAAGCCC |
| siRNA 291 | 291 | GGCUUUUACUAUCUCCAGA | 1431 | UCUGGAGAUAGUAAAAGCC |
| siRNA 292 | 292 | GCUUUUACUAUCUCCAGAA | 1432 | UUCUGGAGAUAGUAAAAGC |
| siRNA 293 | 293 | CUUUUACUAUCUCCAGAAU | 1433 | AUUCUGGAGAUAGUAAAAG |
| siRNA 294 | 294 | UUUUACUAUCUCCAGAAUG | 1434 | CAUUCUGGAGAUAGUAAAA |
| siRNA 295 | 295 | UUUACUAUCUCCAGAAUGU | 1435 | ACAUUCUGGAGAUAGUAAA |
| siRNA 296 | 296 | UUACUAUCUCCAGAAUGUA | 1436 | UACAUUCUGGAGAUAGUAA |
| siRNA 297 | 297 | UACUAUCUCCAGAAUGUAU | 1437 | AUACAUUCUGGAGAUAGUA |
| siRNA 298 | 298 | ACUAUCUCCAGAAUGUAUU | 1438 | AAUACAUUCUGGAGAUAGU |
| siRNA 299 | 299 | CUAUCUCCAGAAUGUAUUU | 1439 | AAAUACAUUCUGGAGAUAG |
| siRNA 300 | 300 | UAUCUCCAGAAUGUAUUUU | 1440 | AAAAUACAUUCUGGAGAUA |
| siRNA 301 | 301 | AUCUCCAGAAUGUAUUUUU | 1441 | AAAAAUACAUUCUGGAGAU |
| siRNA 302 | 302 | UCUCCAGAAUGUAUUUUUC | 1442 | GAAAAAUACAUUCUGGAGA |
| siRNA 303 | 303 | CUCCAGAAUGUAUUUUUCC | 1443 | GGAAAAAUACAUUCUGGAG |
| siRNA 304 | 304 | UCCAGAAUGUAUUUUUCCU | 1444 | AGGAAAAAUACAUUCUGGA |
| siRNA 305 | 305 | CCAGAAUGUAUUUUUCCUU | 1445 | AAGGAAAAAUACAUUCUGG |
| siRNA 306 | 306 | CAGAAUGUAUUUUUCCUUU | 1446 | AAAGGAAAAAUACAUUCUG |
| siRNA 307 | 307 | AGAAUGUAUUUUUCCUUUU | 1447 | AAAAGGAAAAAUACAUUCU |
| siRNA 308 | 308 | GAAUGUAUUUUUCCUUUUU | 1448 | AAAAAGGAAAAAUACAUUC |
| siRNA 309 | 309 | AAUGUAUUUUUCCUUUUUC | 1449 | GAAAAAGGAAAAAUACAUU |
| siRNA 310 | 310 | AUGUAUUUUUCCUUUUUCC | 1450 | GGAAAAAGGAAAAAUACAU |
| siRNA 311 | 311 | UGUAUUUUUCCUUUUUCCG | 1451 | CGGAAAAAGGAAAAAUACA |
| siRNA 312 | 312 | GUAUUUUUCCUUUUUCCGU | 1452 | ACGGAAAAAGGAAAAAUAC |
| siRNA 313 | 313 | UAUUUUUCCUUUUUCCGUA | 1453 | UACGGAAAAAGGAAAAAUA |
| siRNA 314 | 314 | AUUUUUCCUUUUUCCGUAA | 1454 | UUACGGAAAAAGGAAAAAU |
| siRNA 315 | 315 | UUUUUCCUUUUUCCGUAAG | 1455 | CUUACGGAAAAAGGAAAAA |
| siRNA 316 | 316 | UUUUCCUUUUUCCGUAAGA | 1456 | UCUUACGGAAAAAGGAAAA |
| siRNA 317 | 317 | UUUCCUUUUUCCGUAAGAC | 1457 | GUCUUACGGAAAAAGGAAA |
| siRNA 318 | 318 | UUCCUUUUUCCGUAAGACU | 1458 | AGUCUUACGGAAAAAGGAA |
| siRNA 319 | 319 | UCCUUUUUCCGUAAGACUC | 1459 | GAGUCUUACGGAAAAAGGA |
| siRNA 320 | 320 | CCUUUUUCCGUAAGACUCA | 1460 | UGAGUCUUACGGAAAAAGG |
| siRNA 321 | 321 | CUUUUUCCGUAAGACUCAA | 1461 | UUGAGUCUUACGGAAAAAG |
| siRNA 322 | 322 | UUUUUCCGUAAGACUCAAA | 1462 | UUUGAGUCUUACGGAAAAA |
| siRNA 323 | 323 | UUUUCCGUAAGACUCAAAA | 1463 | UUUUGAGUCUUACGGAAAA |
| siRNA 324 | 324 | UUUCCGUAAGACUCAAAAG | 1464 | CUUUUGAGUCUUACGGAAA |
| siRNA 325 | 325 | UUCCGUAAGACUCAAAAGU | 1465 | ACUUUUGAGUCUUACGGAA |
| siRNA 326 | 326 | UCCGUAAGACUCAAAAGUA | 1466 | UACUUUUGAGUCUUACGGA |
| siRNA 327 | 327 | CCGUAAGACUCAAAAGUAA | 1467 | UUACUUUUGAGUCUUACGG |
| siRNA 328 | 328 | CGUAAGACUCAAAAGUAAU | 1468 | AUUACUUUUGAGUCUUACG |
| siRNA 329 | 329 | GUAAGACUCAAAAGUAAUA | 1469 | UAUUACUUUUGAGUCUUAC |
| siRNA 330 | 330 | UAAGACUCAAAAGUAAUAU | 1470 | AUAUUACUUUUGAGUCUUA |
| siRNA 331 | 331 | AAGACUCAAAAGUAAUAUA | 1471 | UAUAUUACUUUUGAGUCUU |
| siRNA 332 | 332 | AGACUCAAAAGUAAUAUAA | 1472 | UUAUAUUACUUUUGAGUCU |
| siRNA 333 | 333 | GACUCAAAAGUAAUAUAAG | 1473 | CUUAUAUUACUUUUGAGUC |
| siRNA 334 | 334 | ACUCAAAAGUAAUAUAAGG | 1474 | CCUUAUAUUACUUUUGAGU |
| siRNA 335 | 335 | CUCAAAAGUAAUAUAAGGU | 1475 | ACCUUAUAUUACUUUUGAG |
| siRNA 336 | 336 | UCAAAAGUAAUAUAAGGUC | 1476 | GACCUUAUAUUACUUUUGA |
| siRNA 337 | 337 | CAAAAGUAAUAUAAGGUCU | 1477 | AGACCUUAUAUUACUUUUG |
| siRNA 338 | 338 | AAAAGUAAUAUAAGGUCUA | 1478 | UAGACCUUAUAUUACUUUU |
| siRNA 339 | 339 | AAAGUAAUAUAAGGUCUAC | 1479 | GUAGACCUUAUAUUACUUU |
| siRNA 340 | 340 | AAGUAAUAUAAGGUCUACA | 1480 | UGUAGACCUUAUAUUACUU |
| siRNA 341 | 341 | AGUAAUAUAAGGUCUACAA | 1481 | UUGUAGACCUUAUAUUACU |
| siRNA 342 | 342 | GUAAUAUAAGGUCUACAAA | 1482 | UUUGUAGACCUUAUAUUAC |
| siRNA 343 | 343 | UAAUAUAAGGUCUACAAAA | 1483 | UUUUGUAGACCUUAUAUUA |
| siRNA 344 | 344 | AAUAUAAGGUCUACAAAAU | 1484 | AUUUUGUAGACCUUAUAUU |
| siRNA 345 | 345 | AUAUAAGGUCUACAAAAUC | 1485 | GAUUUUGUAGACCUUAUAU |
| siRNA 346 | 346 | UAUAAGGUCUACAAAAUCU | 1486 | AGAUUUUGUAGACCUUAUA |
| siRNA 347 | 347 | AUAAGGUCUACAAAAUCUA | 1487 | UAGAUUUUGUAGACCUUAU |
| siRNA 348 | 348 | UAAGGUCUACAAAAUCUAC | 1488 | GUAGAUUUUGUAGACCUUA |
| siRNA 349 | 349 | AAGGUCUACAAAAUCUACU | 1489 | AGUAGAUUUUGUAGACCUU |
| siRNA 350 | 350 | AGGUCUACAAAAUCUACUA | 1490 | UAGUAGAUUUUGUAGACCU |
| siRNA 351 | 351 | GGUCUACAAAAUCUACUAA | 1491 | UUAGUAGAUUUUGUAGACC |
| siRNA 352 | 352 | GUCUACAAAAUCUACUAAA | 1492 | UUUAGUAGAUUUUGUAGAC |
| siRNA 353 | 353 | UCUACAAAAUCUACUAAAA | 1493 | UUUUAGUAGAUUUUGUAGA |
| siRNA 354 | 354 | CUACAAAAUCUACUAAAAA | 1494 | UUUUUAGUAGAUUUUGUAG |
| siRNA 355 | 355 | UACAAAAUCUACUAAAAAG | 1495 | CUUUUUAGUAGAUUUUGUA |
| siRNA 356 | 356 | ACAAAAUCUACUAAAAAGU | 1496 | ACUUUUUAGUAGAUUUUGU |
| siRNA 357 | 357 | CAAAAUCUACUAAAAAGUC | 1497 | GACUUUUUAGUAGAUUUUG |
| siRNA 358 | 358 | AAAAUCUACUAAAAAGUCU | 1498 | AGACUUUUUAGUAGAUUUU |
| siRNA 359 | 359 | AAAUCUACUAAAAAGUCUC | 1499 | GAGACUUUUUAGUAGAUUU |
| siRNA 360 | 360 | AAUCUACUAAAAAGUCUCU | 1500 | AGAGACUUUUUAGUAGAUU |
| siRNA 361 | 361 | AUCUACUAAAAAGUCUCUG | 1501 | CAGAGACUUUUUAGUAGAU |
| siRNA 362 | 362 | UCUACUAAAAAGUCUCUGC | 1502 | GCAGAGACUUUUUAGUAGA |
| siRNA 363 | 363 | CUACUAAAAAGUCUCUGCA | 1503 | UGCAGAGACUUUUUAGUAG |
| siRNA 364 | 364 | UACUAAAAAGUCUCUGCAA | 1504 | UUGCAGAGACUUUUUAGUA |
| siRNA 365 | 365 | ACUAAAAAGUCUCUGCAAA | 1505 | UUUGCAGAGACUUUUUAGU |
| siRNA 366 | 366 | CUAAAAAGUCUCUGCAAAA | 1506 | UUUUGCAGAGACUUUUUAG |
| siRNA 367 | 367 | UAAAAAGUCUCUGCAAAAA | 1507 | UUUUUGCAGAGACUUUUUA |
| siRNA 368 | 368 | AAAAAGUCUCUGCAAAAAG | 1508 | CUUUUUGCAGAGACUUUUU |
| siRNA 369 | 369 | AAAAGUCUCUGCAAAAAGU | 1509 | ACUUUUUGCAGAGACUUUU |
| siRNA 370 | 370 | AAAGUCUCUGCAAAAAGUA | 1510 | UACUUUUUGCAGAGACUUU |
| siRNA 371 | 371 | AAGUCUCUGCAAAAAGUAG | 1511 | CUACUUUUUGCAGAGACUU |
| siRNA 372 | 372 | AGUCUCUGCAAAAAGUAGA | 1512 | UCUACUUUUUGCAGAGACU |
| siRNA 373 | 373 | GUCUCUGCAAAAAGUAGAU | 1513 | AUCUACUUUUUGCAGAGAC |
| siRNA 374 | 374 | UCUCUGCAAAAAGUAGAUG | 1514 | CAUCUACUUUUUGCAGAGA |
| siRNA 375 | 375 | CUCUGCAAAAAGUAGAUGA | 1515 | UCAUCUACUUUUUGCAGAG |
| siRNA 376 | 376 | UCUGCAAAAAGUAGAUGAA | 1516 | UUCAUCUACUUUUUGCAGA |
| siRNA 377 | 377 | CUGCAAAAAGUAGAUGAAG | 1517 | CUUCAUCUACUUUUUGCAG |
| siRNA 378 | 378 | UGCAAAAAGUAGAUGAAGA | 1518 | UCUUCAUCUACUUUUUGCA |
| siRNA 379 | 379 | GCAAAAAGUAGAUGAAGAG | 1519 | CUCUUCAUCUACUUUUUGC |
| siRNA 380 | 380 | CAAAAAGUAGAUGAAGAGG | 1520 | CCUCUUCAUCUACUUUUUG |
| siRNA 381 | 381 | AAAAAGUAGAUGAAGAGGA | 1521 | UCCUCUUCAUCUACUUUUU |
| siRNA 382 | 382 | AAAAGUAGAUGAAGAGGAC | 1522 | GUCCUCUUCAUCUACUUUU |
| siRNA 383 | 383 | AAAGUAGAUGAAGAGGACU | 1523 | AGUCCUCUUCAUCUACUUU |
| siRNA 384 | 384 | AAGUAGAUGAAGAGGACUC | 1524 | GAGUCCUCUUCAUCUACUU |
| siRNA 385 | 385 | AGUAGAUGAAGAGGACUCU | 1525 | AGAGUCCUCUUCAUCUACU |
| SiRNA 386 | 386 | GUAGAUGAAGAGGACUCUG | 1526 | CAGAGUCCUCUUCAUCUAC |
| siRNA 387 | 387 | UAGAUGAAGAGGACUCUGA | 1527 | UCAGAGUCCUCUUCAUCUA |
| siRNA 388 | 388 | AGAUGAAGAGGACUCUGAU | 1528 | AUCAGAGUCCUCUUCAUCU |
| siRNA 389 | 389 | GAUGAAGAGGACUCUGAUG | 1529 | CAUCAGAGUCCUCUUCAUC |
| siRNA 390 | 390 | AUGAAGAGGACUCUGAUGA | 1530 | UCAUCAGAGUCCUCUUCAU |
| siRNA 391 | 391 | UGAAGAGGACUCUGAUGAA | 1531 | UUCAUCAGAGUCCUCUUCA |
| siRNA 392 | 392 | GAAGAGGACUCUGAUGAAG | 1532 | CUUCAUCAGAGUCCUCUUC |
| siRNA 393 | 393 | AAGAGGACUCUGAUGAAGA | 1533 | UCUUCAUCAGAGUCCUCUU |
| siRNA 394 | 394 | AGAGGACUCUGAUGAAGAA | 1534 | UUCUUCAUCAGAGUCCUCU |
| siRNA 395 | 395 | GAGGACUCUGAUGAAGAAA | 1535 | UUUCUUCAUCAGAGUCCUC |
| siRNA 396 | 396 | AGGACUCUGAUGAAGAAAG | 1536 | CUUUCUUCAUCAGAGUCCU |
| siRNA 397 | 397 | GGACUCUGAUGAAGAAAGC | 1537 | GCUUUCUUCAUCAGAGUCC |
| siRNA 398 | 398 | GACUCUGAUGAAGAAAGCC | 1538 | GGCUUUCUUCAUCAGAGUC |
| siRNA 399 | 399 | ACUCUGAUGAAGAAAGCCA | 1539 | UGGCUUUCUUCAUCAGAGU |
| siRNA 400 | 400 | CUCUGAUGAAGAAAGCCAU | 1540 | AUGGCUUUCUUCAUCAGAG |
| siRNA 401 | 401 | UCUGAUGAAGAAAGCCAUC | 1541 | GAUGGCUUUCUUCAUCAGA |
| siRNA 402 | 402 | CUGAUGAAGAAAGCCAUCA | 1542 | UGAUGGCUUUCUUCAUCAG |
| siRNA 403 | 403 | UGAUGAAGAAAGCCAUCAU | 1543 | AUGAUGGCUUUCUUCAUCA |
| siRNA 404 | 404 | GAUGAAGAAAGCCAUCAUG | 1544 | CAUGAUGGCUUUCUUCAUC |
| siRNA 405 | 405 | AUGAAGAAAGCCAUCAUGA | 1545 | UCAUGAUGGCUUUCUUCAU |
| siRNA 406 | 406 | UGAAGAAAGCCAUCAUGAU | 1546 | AUCAUGAUGGCUUUCUUCA |
| siRNA 407 | 407 | GAAGAAAGCCAUCAUGAUG | 1547 | CAUCAUGAUGGCUUUCUUC |
| siRNA 408 | 408 | AAGAAAGCCAUCAUGAUGA | 1548 | UCAUCAUGAUGGCUUUCUU |
| siRNA 409 | 409 | AGAAAGCCAUCAUGAUGAG | 1549 | CUCAUCAUGAUGGCUUUCU |
| siRNA 410 | 410 | GAAAGCCAUCAUGAUGAGA | 1550 | UCUCAUCAUGAUGGCUUUC |
| siRNA 411 | 411 | AAAGCCAUCAUGAUGAGAU | 1551 | AUCUCAUCAUGAUGGCUUU |
| siRNA 412 | 412 | AAGCCAUCAUGAUGAGAUG | 1552 | CAUCUCAUCAUGAUGGCUU |
| siRNA 413 | 413 | AGCCAUCAUGAUGAGAUGA | 1553 | UCAUCUCAUCAUGAUGGCU |
| siRNA 414 | 414 | GCCAUCAUGAUGAGAUGAG | 1554 | CUCAUCUCAUCAUGAUGGC |
| siRNA 415 | 415 | CCAUCAUGAUGAGAUGAGU | 1555 | ACUCAUCUCAUCAUGAUGG |
| siRNA 416 | 416 | CAUCAUGAUGAGAUGAGUG | 1556 | CACUCAUCUCAUCAUGAUG |
| siRNA 417 | 417 | AUCAUGAUGAGAUGAGUGA | 1557 | UCACUCAUCUCAUCAUGAU |
| siRNA 418 | 418 | UCAUGAUGAGAUGAGUGAG | 1558 | CUCACUCAUCUCAUCAUGA |
| SiRNA 419 | 419 | CAUGAUGAGAUGAGUGAGC | 1559 | GCUCACUCAUCUCAUCAUG |
| siRNA 420 | 420 | AUGAUGAGAUGAGUGAGCA | 1560 | UGCUCACUCAUCUCAUCAU |
| siRNA 421 | 421 | UGAUGAGAUGAGUGAGCAG | 1561 | CUGCUCACUCAUCUCAUCA |
| siRNA 422 | 422 | GAUGAGAUGAGUGAGCAGG | 1562 | CCUGCUCACUCAUCUCAUC |
| siRNA 423 | 423 | AUGAGAUGAGUGAGCAGGA | 1563 | UCCUGCUCACUCAUCUCAU |
| siRNA 424 | 424 | UGAGAUGAGUGAGCAGGAA | 1564 | UUCCUGCUCACUCAUCUCA |
| siRNA 425 | 425 | GAGAUGAGUGAGCAGGAAG | 1565 | CUUCCUGCUCACUCAUCUC |
| siRNA 426 | 426 | AGAUGAGUGAGCAGGAAGA | 1566 | UCUUCCUGCUCACUCAUCU |
| siRNA 427 | 427 | GAUGAGUGAGCAGGAAGAG | 1567 | CUCUUCCUGCUCACUCAUC |
| siRNA 428 | 428 | AUGAGUGAGCAGGAAGAGG | 1568 | CCUCUUCCUGCUCACUCAU |
| siRNA 429 | 429 | UGAGUGAGCAGGAAGAGGA | 1569 | UCCUCUUCCUGCUCACUCA |
| siRNA 430 | 430 | GAGUGAGCAGGAAGAGGAG | 1570 | CUCCUCUUCCUGCUCACUC |
| siRNA 431 | 431 | AGUGAGCAGGAAGAGGAGC | 1571 | GCUCCUCUUCCUGCUCACU |
| siRNA 432 | 432 | GUGAGCAGGAAGAGGAGCU | 1572 | AGCUCCUCUUCCUGCUCAC |
| siRNA 433 | 433 | UGAGCAGGAAGAGGAGCUU | 1573 | AAGCUCCUCUUCCUGCUCA |
| siRNA 434 | 434 | GAGCAGGAAGAGGAGCUUG | 1574 | CAAGCUCCUCUUCCUGCUC |
| siRNA 435 | 435 | AGCAGGAAGAGGAGCUUGA | 1575 | UCAAGCUCCUCUUCCUGCU |
| siRNA 436 | 436 | GCAGGAAGAGGAGCUUGAG | 1576 | CUCAAGCUCCUCUUCCUGC |
| siRNA 437 | 437 | CAGGAAGAGGAGCUUGAGG | 1577 | CCUCAAGCUCCUCUUCCUG |
| siRNA 438 | 438 | AGGAAGAGGAGCUUGAGGA | 1578 | UCCUCAAGCUCCUCUUCCU |
| siRNA 439 | 439 | GGAAGAGGAGCUUGAGGAU | 1579 | AUCCUCAAGCUCCUCUUCC |
| siRNA 440 | 440 | GAAGAGGAGCUUGAGGAUG | 1580 | CAUCCUCAAGCUCCUCUUC |
| siRNA 441 | 441 | AAGAGGAGCUUGAGGAUGA | 1581 | UCAUCCUCAAGCUCCUCUU |
| siRNA 442 | 442 | AGAGGAGCUUGAGGAUGAU | 1582 | AUCAUCCUCAAGCUCCUCU |
| siRNA 443 | 443 | GAGGAGCUUGAGGAUGAUC | 1583 | GAUCAUCCUCAAGCUCCUC |
| siRNA 444 | 444 | AGGAGCUUGAGGAUGAUCC | 1584 | GGAUCAUCCUCAAGCUCCU |
| siRNA 445 | 445 | GGAGCUUGAGGAUGAUCCU | 1585 | AGGAUCAUCCUCAAGCUCC |
| siRNA 446 | 446 | GAGCUUGAGGAUGAUCCUA | 1586 | UAGGAUCAUCCUCAAGCUC |
| siRNA 447 | 447 | AGCUUGAGGAUGAUCCUAC | 1587 | GUAGGAUCAUCCUCAAGCU |
| siRNA 448 | 448 | GCUUGAGGAUGAUCCUACU | 1588 | AGUAGGAUCAUCCUCAAGC |
| siRNA 449 | 449 | CUUGAGGAUGAUCCUACUG | 1589 | CAGUAGGAUCAUCCUCAAG |
| siRNA 450 | 450 | UUGAGGAUGAUCCUACUGU | 1590 | ACAGUAGGAUCAUCCUCAA |
| siRNA 451 | 451 | UGAGGAUGAUCCUACUGUA | 1591 | UACAGUAGGAUCAUCCUCA |
| siRNA 452 | 452 | GAGGAUGAUCCUACUGUAG | 1592 | CUACAGUAGGAUCAUCCUC |
| siRNA 453 | 453 | AGGAUGAUCCUACUGUAGU | 1593 | ACUACAGUAGGAUCAUCCU |
| siRNA 454 | 454 | GGAUGAUCCUACUGUAGUC | 1594 | GACUACAGUAGGAUCAUCC |
| siRNA 455 | 455 | GAUGAUCCUACUGUAGUCA | 1595 | UGACUACAGUAGGAUCAUC |
| siRNA 456 | 456 | AUGAUCCUACUGUAGUCAA | 1596 | UUGACUACAGUAGGAUCAU |
| siRNA 457 | 457 | UGAUCCUACUGUAGUCAAA | 1597 | UUUGACUACAGUAGGAUCA |
| siRNA 458 | 458 | GAUCCUACUGUAGUCAAAA | 1598 | UUUUGACUACAGUAGGAUC |
| siRNA 459 | 459 | AUCCUACUGUAGUCAAAAA | 1599 | UUUUUGACUACAGUAGGAU |
| siRNA 460 | 460 | UCCUACUGUAGUCAAAAAC | 1600 | GUUUUUGACUACAGUAGGA |
| siRNA 461 | 461 | CCUACUGUAGUCAAAAACU | 1601 | AGUUUUUGACUACAGUAGG |
| siRNA 462 | 462 | CUACUGUAGUCAAAAACUA | 1602 | UAGUUUUUGACUACAGUAG |
| siRNA 463 | 463 | UACUGUAGUCAAAAACUAU | 1603 | AUAGUUUUUGACUACAGUA |
| siRNA 464 | 464 | ACUGUAGUCAAAAACUAUA | 1604 | UAUAGUUUUUGACUACAGU |
| siRNA 465 | 465 | CUGUAGUCAAAAACUAUAA | 1605 | UUAUAGUUUUUGACUACAG |
| siRNA 466 | 466 | UGUAGUCAAAAACUAUAAA | 1606 | UUUAUAGUUUUUGACUACA |
| siRNA 467 | 467 | GUAGUCAAAAACUAUAAAG | 1607 | CUUUAUAGUUUUUGACUAC |
| siRNA 468 | 468 | UAGUCAAAAACUAUAAAGA | 1608 | UCUUUAUAGUUUUUGACUA |
| siRNA 469 | 469 | AGUCAAAAACUAUAAAGAC | 1609 | GUCUUUAUAGUUUUUGACU |
| siRNA 470 | 470 | GUCAAAAACUAUAAAGACC | 1610 | GGUCUUUAUAGUUUUUGAC |
| siRNA 471 | 471 | UCAAAAACUAUAAAGACCU | 1611 | AGGUCUUUAUAGUUUUUGA |
| siRNA 472 | 472 | CAAAAACUAUAAAGACCUG | 1612 | CAGGUCUUUAUAGUUUUUG |
| siRNA 473 | 473 | AAAAACUAUAAAGACCUGG | 1613 | CCAGGUCUUUAUAGUUUUU |
| siRNA 474 | 474 | AAAACUAUAAAGACCUGGA | 1614 | UCCAGGUCUUUAUAGUUUU |
| siRNA 475 | 475 | AAACUAUAAAGACCUGGAA | 1615 | UUCCAGGUCUUUAUAGUUU |
| siRNA 476 | 476 | AACUAUAAAGACCUGGAAA | 1616 | UUUCCAGGUCUUUAUAGUU |
| siRNA 477 | 477 | ACUAUAAAGACCUGGAAAA | 1617 | UUUUCCAGGUCUUUAUAGU |
| siRNA 478 | 478 | CUAUAAAGACCUGGAAAAA | 1618 | UUUUUCCAGGUCUUUAUAG |
| siRNA 479 | 479 | UAUAAAGACCUGGAAAAAG | 1619 | CUUUUUCCAGGUCUUUAUA |
| siRNA 480 | 480 | AUAAAGACCUGGAAAAAGC | 1620 | GCUUUUUCCAGGUCUUUAU |
| siRNA 481 | 481 | UAAAGACCUGGAAAAAGCA | 1621 | UGCUUUUUCCAGGUCUUUA |
| siRNA 482 | 482 | AAAGACCUGGAAAAAGCAG | 1622 | CUGCUUUUUCCAGGUCUUU |
| siRNA 483 | 483 | AAGACCUGGAAAAAGCAGU | 1623 | ACUGCUUUUUCCAGGUCUU |
| siRNA 484 | 484 | AGACCUGGAAAAAGCAGUU | 1624 | AACUGCUUUUUCCAGGUCU |
| siRNA 485 | 485 | GACCUGGAAAAAGCAGUUC | 1625 | GAACUGCUUUUUCCAGGUC |
| siRNA 486 | 486 | ACCUGGAAAAAGCAGUUCA | 1626 | UGAACUGCUUUUUCCAGGU |
| siRNA 487 | 487 | CCUGGAAAAAGCAGUUCAG | 1627 | CUGAACUGCUUUUUCCAGG |
| siRNA 488 | 488 | CUGGAAAAAGCAGUUCAGU | 1628 | ACUGAACUGCUUUUUCCAG |
| siRNA 489 | 489 | UGGAAAAAGCAGUUCAGUC | 1629 | GACUGAACUGCUUUUUCCA |
| siRNA 490 | 490 | GGAAAAAGCAGUUCAGUCU | 1630 | AGACUGAACUGCUUUUUCC |
| siRNA 491 | 491 | GAAAAAGCAGUUCAGUCUU | 1631 | AAGACUGAACUGCUUUUUC |
| siRNA 492 | 492 | AAAAAGCAGUUCAGUCUUU | 1632 | AAAGACUGAACUGCUUUUU |
| siRNA 493 | 493 | AAAAGCAGUUCAGUCUUUU | 1633 | AAAAGACUGAACUGCUUUU |
| siRNA 494 | 494 | AAAGCAGUUCAGUCUUUUC | 1634 | GAAAAGACUGAACUGCUUU |
| siRNA 495 | 495 | AAGCAGUUCAGUCUUUUCG | 1635 | CGAAAAGACUGAACUGCUU |
| siRNA 496 | 496 | AGCAGUUCAGUCUUUUCGG | 1636 | CCGAAAAGACUGAACUGCU |
| siRNA 497 | 497 | GCAGUUCAGUCUUUUCGGU | 1637 | ACCGAAAAGACUGAACUGC |
| siRNA 498 | 498 | CAGUUCAGUCUUUUCGGUA | 1638 | UACCGAAAAGACUGAACUG |
| siRNA 499 | 499 | AGUUCAGUCUUUUCGGUAU | 1639 | AUACCGAAAAGACUGAACU |
| SIRNA 500 | 500 | GUUCAGUCUUUUCGGUAUG | 1640 | CAUACCGAAAAGACUGAAC |
| siRNA 501 | 501 | UUCAGUCUUUUCGGUAUGA | 1641 | UCAUACCGAAAAGACUGAA |
| siRNA 502 | 502 | UCAGUCUUUUCGGUAUGAU | 1642 | AUCAUACCGAAAAGACUGA |
| siRNA 503 | 503 | CAGUCUUUUCGGUAUGAUG | 1643 | CAUCAUACCGAAAAGACUG |
| siRNA 504 | 504 | AGUCUUUUCGGUAUGAUGU | 1644 | ACAUCAUACCGAAAAGACU |
| siRNA 505 | 505 | GUCUUUUCGGUAUGAUGUU | 1645 | AACAUCAUACCGAAAAGAC |
| siRNA 506 | 506 | UCUUUUCGGUAUGAUGUUG | 1646 | CAACAUCAUACCGAAAAGA |
| siRNA 507 | 507 | CUUUUCGGUAUGAUGUUGU | 1647 | ACAACAUCAUACCGAAAAG |
| siRNA 508 | 508 | UUUUCGGUAUGAUGUUGUC | 1648 | GACAACAUCAUACCGAAAA |
| siRNA 509 | 509 | UUUCGGUAUGAUGUUGUCC | 1649 | GGACAACAUCAUACCGAAA |
| siRNA 510 | 510 | UUCGGUAUGAUGUUGUCCU | 1650 | AGGACAACAUCAUACCGAA |
| siRNA 511 | 511 | UCGGUAUGAUGUUGUCCUG | 1651 | CAGGACAACAUCAUACCGA |
| siRNA 512 | 512 | CGGUAUGAUGUUGUCCUGA | 1652 | UCAGGACAACAUCAUACCG |
| siRNA 513 | 513 | GGUAUGAUGUUGUCCUGAA | 1653 | UUCAGGACAACAUCAUACC |
| siRNA 514 | 514 | GUAUGAUGUUGUCCUGAAG | 1654 | CUUCAGGACAACAUCAUAC |
| siRNA 515 | 515 | UAUGAUGUUGUCCUGAAGA | 1655 | UCUUCAGGACAACAUCAUA |
| siRNA 516 | 516 | AUGAUGUUGUCCUGAAGAC | 1656 | GUCUUCAGGACAACAUCAU |
| siRNA 517 | 517 | UGAUGUUGUCCUGAAGACG | 1657 | CGUCUUCAGGACAACAUCA |
| siRNA 518 | 518 | GAUGUUGUCCUGAAGACGG | 1658 | CCGUCUUCAGGACAACAUC |
| siRNA 519 | 519 | AUGUUGUCCUGAAGACGGG | 1659 | CCCGUCUUCAGGACAACAU |
| siRNA 520 | 520 | UGUUGUCCUGAAGACGGGG | 1660 | CCCCGUCUUCAGGACAACA |
| siRNA 521 | 521 | GUUGUCCUGAAGACGGGGC | 1661 | GCCCCGUCUUCAGGACAAC |
| siRNA 522 | 522 | UUGUCCUGAAGACGGGGCU | 1662 | AGCCCCGUCUUCAGGACAA |
| siRNA 523 | 523 | UGUCCUGAAGACGGGGCUA | 1663 | UAGCCCCGUCUUCAGGACA |
| siRNA 524 | 524 | GUCCUGAAGACGGGGCUAG | 1664 | CUAGCCCCGUCUUCAGGAC |
| siRNA 525 | 525 | UCCUGAAGACGGGGCUAGA | 1665 | UCUAGCCCCGUCUUCAGGA |
| siRNA 526 | 526 | CCUGAAGACGGGGCUAGAU | 1666 | AUCUAGCCCCGUCUUCAGG |
| siRNA 527 | 527 | CUGAAGACGGGGCUAGAUA | 1667 | UAUCUAGCCCCGUCUUCAG |
| siRNA 528 | 528 | UGAAGACGGGGCUAGAUAU | 1668 | AUAUCUAGCCCCGUCUUCA |
| siRNA 529 | 529 | GAAGACGGGGCUAGAUAUU | 1669 | AAUAUCUAGCCCCGUCUUC |
| siRNA 530 | 530 | AAGACGGGGCUAGAUAUUG | 1670 | CAAUAUCUAGCCCCGUCUU |
| siRNA 531 | 531 | AGACGGGGCUAGAUAUUGG | 1671 | CCAAUAUCUAGCCCCGUCU |
| siRNA 532 | 532 | GACGGGGCUAGAUAUUGGG | 1672 | CCCAAUAUCUAGCCCCGUC |
| siRNA 533 | 533 | ACGGGGCUAGAUAUUGGGA | 1673 | UCCCAAUAUCUAGCCCCGU |
| siRNA 534 | 534 | CGGGGCUAGAUAUUGGGAG | 1674 | CUCCCAAUAUCUAGCCCCG |
| siRNA 535 | 535 | GGGGCUAGAUAUUGGGAGA | 1675 | UCUCCCAAUAUCUAGCCCC |
| siRNA 536 | 536 | GGGCUAGAUAUUGGGAGAA | 1676 | UUCUCCCAAUAUCUAGCCC |
| siRNA 537 | 537 | GGCUAGAUAUUGGGAGAAA | 1677 | UUUCUCCCAAUAUCUAGCC |
| siRNA 538 | 538 | GCUAGAUAUUGGGAGAAAC | 1678 | GUUUCUCCCAAUAUCUAGC |
| siRNA 539 | 539 | CUAGAUAUUGGGAGAAACA | 1679 | UGUUUCUCCCAAUAUCUAG |
| siRNA 540 | 540 | UAGAUAUUGGGAGAAACAA | 1680 | UUGUUUCUCCCAAUAUCUA |
| siRNA 541 | 541 | AGAUAUUGGGAGAAACAAA | 1681 | UUUGUUUCUCCCAAUAUCU |
| siRNA 542 | 542 | GAUAUUGGGAGAAACAAAG | 1682 | CUUUGUUUCUCCCAAUAUC |
| siRNA 543 | 543 | AUAUUGGGAGAAACAAAGU | 1683 | ACUUUGUUUCUCCCAAUAU |
| siRNA 544 | 544 | UAUUGGGAGAAACAAAGUG | 1684 | CACUUUGUUUCUCCCAAUA |
| siRNA 545 | 545 | AUUGGGAGAAACAAAGUGG | 1685 | CCACUUUGUUUCUCCCAAU |
| siRNA 546 | 546 | UUGGGAGAAACAAAGUGGA | 1686 | UCCACUUUGUUUCUCCCAA |
| siRNA 547 | 547 | UGGGAGAAACAAAGUGGAA | 1687 | UUCCACUUUGUUUCUCCCA |
| siRNA 548 | 548 | GGGAGAAACAAAGUGGAAG | 1688 | CUUCCACUUUGUUUCUCCC |
| siRNA 549 | 549 | GGAGAAACAAAGUGGAAGA | 1689 | UCUUCCACUUUGUUUCUCC |
| siRNA 550 | 550 | GAGAAACAAAGUGGAAGAU | 1690 | AUCUUCCACUUUGUUUCUC |
| siRNA 551 | 551 | AGAAACAAAGUGGAAGAUG | 1691 | CAUCUUCCACUUUGUUUCU |
| siRNA 552 | 552 | GAAACAAAGUGGAAGAUGC | 1692 | GCAUCUUCCACUUUGUUUC |
| siRNA 553 | 553 | AAACAAAGUGGAAGAUGCU | 1693 | AGCAUCUUCCACUUUGUUU |
| siRNA 554 | 554 | AACAAAGUGGAAGAUGCUU | 1694 | AAGCAUCUUCCACUUUGUU |
| siRNA 555 | 555 | ACAAAGUGGAAGAUGCUUU | 1695 | AAAGCAUCUUCCACUUUGU |
| siRNA 556 | 556 | CAAAGUGGAAGAUGCUUUC | 1696 | GAAAGCAUCUUCCACUUUG |
| siRNA 557 | 557 | AAAGUGGAAGAUGCUUUCU | 1697 | AGAAAGCAUCUUCCACUUU |
| siRNA 558 | 558 | AAGUGGAAGAUGCUUUCUA | 1698 | UAGAAAGCAUCUUCCACUU |
| siRNA 559 | 559 | AGUGGAAGAUGCUUUCUAC | 1699 | GUAGAAAGCAUCUUCCACU |
| siRNA 560 | 560 | GUGGAAGAUGCUUUCUACA | 1700 | UGUAGAAAGCAUCUUCCAC |
| siRNA 561 | 561 | UGGAAGAUGCUUUCUACAA | 1701 | UUGUAGAAAGCAUCUUCCA |
| siRNA 562 | 562 | GGAAGAUGCUUUCUACAAA | 1702 | UUUGUAGAAAGCAUCUUCC |
| siRNA 563 | 563 | GAAGAUGCUUUCUACAAAG | 1703 | CUUUGUAGAAAGCAUCUUC |
| siRNA 564 | 564 | AAGAUGCUUUCUACAAAGG | 1704 | CCUUUGUAGAAAGCAUCUU |
| siRNA 565 | 565 | AGAUGCUUUCUACAAAGGU | 1705 | ACCUUUGUAGAAAGCAUCU |
| siRNA 566 | 566 | GAUGCUUUCUACAAAGGUG | 1706 | CACCUUUGUAGAAAGCAUC |
| siRNA 567 | 567 | AUGCUUUCUACAAAGGUGA | 1707 | UCACCUUUGUAGAAAGCAU |
| siRNA 568 | 568 | UGCUUUCUACAAAGGUGAA | 1708 | UUCACCUUUGUAGAAAGCA |
| siRNA 569 | 569 | GCUUUCUACAAAGGUGAAC | 1709 | GUUCACCUUUGUAGAAAGC |
| siRNA 570 | 570 | CUUUCUACAAAGGUGAACU | 1710 | AGUUCACCUUUGUAGAAAG |
| siRNA 571 | 571 | UUUCUACAAAGGUGAACUC | 1711 | GAGUUCACCUUUGUAGAAA |
| siRNA 572 | 572 | UUCUACAAAGGUGAACUCA | 1712 | UGAGUUCACCUUUGUAGAA |
| siRNA 573 | 573 | UCUACAAAGGUGAACUCAG | 1713 | CUGAGUUCACCUUUGUAGA |
| siRNA 574 | 574 | CUACAAAGGUGAACUCAGG | 1714 | CCUGAGUUCACCUUUGUAG |
| siRNA 575 | 575 | UACAAAGGUGAACUCAGGC | 1715 | GCCUGAGUUCACCUUUGUA |
| siRNA 576 | 576 | ACAAAGGUGAACUCAGGCU | 1716 | AGCCUGAGUUCACCUUUGU |
| siRNA 577 | 577 | CAAAGGUGAACUCAGGCUG | 1717 | CAGCCUGAGUUCACCUUUG |
| siRNA 578 | 578 | AAAGGUGAACUCAGGCUGA | 1718 | UCAGCCUGAGUUCACCUUU |
| siRNA 579 | 579 | AAGGUGAACUCAGGCUGAA | 1719 | UUCAGCCUGAGUUCACCUU |
| siRNA 580 | 580 | AGGUGAACUCAGGCUGAAU | 1720 | AUUCAGCCUGAGUUCACCU |
| siRNA 581 | 581 | GGUGAACUCAGGCUGAAUG | 1721 | CAUUCAGCCUGAGUUCACC |
| siRNA 582 | 582 | GUGAACUCAGGCUGAAUGA | 1722 | UCAUUCAGCCUGAGUUCAC |
| siRNA 583 | 583 | UGAACUCAGGCUGAAUGAG | 1723 | CUCAUUCAGCCUGAGUUCA |
| siRNA 584 | 584 | GAACUCAGGCUGAAUGAGG | 1724 | CCUCAUUCAGCCUGAGUUC |
| siRNA 585 | 585 | AACUCAGGCUGAAUGAGGA | 1725 | UCCUCAUUCAGCCUGAGUU |
| siRNA 586 | 586 | ACUCAGGCUGAAUGAGGAA | 1726 | UUCCUCAUUCAGCCUGAGU |
| siRNA 587 | 587 | CUCAGGCUGAAUGAGGAAA | 1727 | UUUCCUCAUUCAGCCUGAG |
| siRNA 588 | 588 | UCAGGCUGAAUGAGGAAAA | 1728 | UUUUCCUCAUUCAGCCUGA |
| siRNA 589 | 589 | CAGGCUGAAUGAGGAAAAA | 1729 | UUUUUCCUCAUUCAGCCUG |
| siRNA 590 | 590 | AGGCUGAAUGAGGAAAAAU | 1730 | AUUUUUCCUCAUUCAGCCU |
| siRNA 591 | 591 | GGCUGAAUGAGGAAAAAUU | 1731 | AAUUUUUCCUCAUUCAGCC |
| siRNA 592 | 592 | GCUGAAUGAGGAAAAAUUA | 1732 | UAAUUUUUCCUCAUUCAGC |
| siRNA 593 | 593 | CUGAAUGAGGAAAAAUUAU | 1733 | AUAAUUUUUCCUCAUUCAG |
| siRNA 594 | 594 | UGAAUGAGGAAAAAUUAUG | 1734 | CAUAAUUUUUCCUCAUUCA |
| siRNA 595 | 595 | GAAUGAGGAAAAAUUAUGG | 1735 | CCAUAAUUUUUCCUCAUUC |
| siRNA 596 | 596 | AAUGAGGAAAAAUUAUGGA | 1736 | UCCAUAAUUUUUCCUCAUU |
| siRNA 597 | 597 | AUGAGGAAAAAUUAUGGAA | 1737 | UUCCAUAAUUUUUCCUCAU |
| siRNA 598 | 598 | UGAGGAAAAAUUAUGGAAG | 1738 | CUUCCAUAAUUUUUCCUCA |
| siRNA 599 | 599 | GAGGAAAAAUUAUGGAAGA | 1739 | UCUUCCAUAAUUUUUCCUC |
| siRNA 600 | 600 | AGGAAAAAUUAUGGAAGAA | 1740 | UUCUUCCAUAAUUUUUCCU |
| siRNA 601 | 601 | GGAAAAAUUAUGGAAGAAA | 1741 | UUUCUUCCAUAAUUUUUCC |
| siRNA 602 | 602 | GAAAAAUUAUGGAAGAAAA | 1742 | UUUUCUUCCAUAAUUUUUC |
| siRNA 603 | 603 | AAAAAUUAUGGAAGAAAAG | 1743 | CUUUUCUUCCAUAAUUUUU |
| siRNA 604 | 604 | AAAAUUAUGGAAGAAAAGC | 1744 | GCUUUUCUUCCAUAAUUUU |
| siRNA 605 | 605 | AAAUUAUGGAAGAAAAGCA | 1745 | UGCUUUUCUUCCAUAAUUU |
| siRNA 606 | 606 | AAUUAUGGAAGAAAAGCAG | 1746 | CUGCUUUUCUUCCAUAAUU |
| siRNA 607 | 607 | AUUAUGGAAGAAAAGCAGA | 1747 | UCUGCUUUUCUUCCAUAAU |
| siRNA 608 | 608 | UUAUGGAAGAAAAGCAGAA | 1748 | UUCUGCUUUUCUUCCAUAA |
| siRNA 609 | 609 | UAUGGAAGAAAAGCAGAAC | 1749 | GUUCUGCUUUUCUUCCAUA |
| SIRNA 610 | 610 | AUGGAAGAAAAGCAGAACG | 1750 | CGUUCUGCUUUUCUUCCAU |
| siRNA 611 | 611 | UGGAAGAAAAGCAGAACGG | 1751 | CCGUUCUGCUUUUCUUCCA |
| siRNA 612 | 612 | GGAAGAAAAGCAGAACGGU | 1752 | ACCGUUCUGCUUUUCUUCC |
| siRNA 613 | 613 | GAAGAAAAGCAGAACGGUG | 1753 | CACCGUUCUGCUUUUCUUC |
| siRNA 614 | 614 | AAGAAAAGCAGAACGGUGA | 1754 | UCACCGUUCUGCUUUUCUU |
| siRNA 615 | 615 | AGAAAAGCAGAACGGUGAA | 1755 | UUCACCGUUCUGCUUUUCU |
| siRNA 616 | 616 | GAAAAGCAGAACGGUGAAA | 1756 | UUUCACCGUUCUGCUUUUC |
| siRNA 617 | 617 | AAAAGCAGAACGGUGAAAG | 1757 | CUUUCACCGUUCUGCUUUU |
| siRNA 618 | 618 | AAAGCAGAACGGUGAAAGU | 1758 | ACUUUCACCGUUCUGCUUU |
| siRNA 619 | 619 | AAGCAGAACGGUGAAAGUG | 1759 | CACUUUCACCGUUCUGCUU |
| siRNA 620 | 620 | AGCAGAACGGUGAAAGUGG | 1760 | CCACUUUCACCGUUCUGCU |
| siRNA 621 | 621 | GCAGAACGGUGAAAGUGGG | 1761 | CCCACUUUCACCGUUCUGC |
| siRNA 622 | 622 | CAGAACGGUGAAAGUGGGA | 1762 | UCCCACUUUCACCGUUCUG |
| siRNA 623 | 623 | AGAACGGUGAAAGUGGGAG | 1763 | CUCCCACUUUCACCGUUCU |
| siRNA 624 | 624 | GAACGGUGAAAGUGGGAGA | 1764 | UCUCCCACUUUCACCGUUC |
| siRNA 625 | 625 | AACGGUGAAAGUGGGAGAU | 1765 | AUCUCCCACUUUCACCGUU |
| siRNA 626 | 626 | ACGGUGAAAGUGGGAGAUA | 1766 | UAUCUCCCACUUUCACCGU |
| siRNA 627 | 627 | CGGUGAAAGUGGGAGAUAC | 1767 | GUAUCUCCCACUUUCACCG |
| siRNA 628 | 628 | GGUGAAAGUGGGAGAUACA | 1768 | UGUAUCUCCCACUUUCACC |
| siRNA 629 | 629 | GUGAAAGUGGGAGAUACAU | 1769 | AUGUAUCUCCCACUUUCAC |
| siRNA 630 | 630 | UGAAAGUGGGAGAUACAUU | 1770 | AAUGUAUCUCCCACUUUCA |
| siRNA 631 | 631 | GAAAGUGGGAGAUACAUUG | 1771 | CAAUGUAUCUCCCACUUUC |
| siRNA 632 | 632 | AAAGUGGGAGAUACAUUGG | 1772 | CCAAUGUAUCUCCCACUUU |
| siRNA 633 | 633 | AAGUGGGAGAUACAUUGGA | 1773 | UCCAAUGUAUCUCCCACUU |
| siRNA 634 | 634 | AGUGGGAGAUACAUUGGAU | 1774 | AUCCAAUGUAUCUCCCACU |
| siRNA 635 | 635 | GUGGGAGAUACAUUGGAUC | 1775 | GAUCCAAUGUAUCUCCCAC |
| siRNA 636 | 636 | UGGGAGAUACAUUGGAUCU | 1776 | AGAUCCAAUGUAUCUCCCA |
| siRNA 637 | 637 | GGGAGAUACAUUGGAUCUU | 1777 | AAGAUCCAAUGUAUCUCCC |
| siRNA 638 | 638 | GGAGAUACAUUGGAUCUUC | 1778 | GAAGAUCCAAUGUAUCUCC |
| siRNA 639 | 639 | GAGAUACAUUGGAUCUUCU | 1779 | AGAAGAUCCAAUGUAUCUC |
| siRNA 640 | 640 | AGAUACAUUGGAUCUUCUC | 1780 | GAGAAGAUCCAAUGUAUCU |
| siRNA 641 | 641 | GAUACAUUGGAUCUUCUCA | 1781 | UGAGAAGAUCCAAUGUAUC |
| siRNA 642 | 642 | AUACAUUGGAUCUUCUCAU | 1782 | AUGAGAAGAUCCAAUGUAU |
| siRNA 643 | 643 | UACAUUGGAUCUUCUCAUU | 1783 | AAUGAGAAGAUCCAAUGUA |
| siRNA 644 | 644 | ACAUUGGAUCUUCUCAUUG | 1784 | CAAUGAGAAGAUCCAAUGU |
| siRNA 645 | 645 | CAUUGGAUCUUCUCAUUGG | 1785 | CCAAUGAGAAGAUCCAAUG |
| siRNA 646 | 646 | AUUGGAUCUUCUCAUUGGA | 1786 | UCCAAUGAGAAGAUCCAAU |
| siRNA 647 | 647 | UUGGAUCUUCUCAUUGGAG | 1787 | CUCCAAUGAGAAGAUCCAA |
| siRNA 648 | 648 | UGGAUCUUCUCAUUGGAGA | 1788 | UCUCCAAUGAGAAGAUCCA |
| siRNA 649 | 649 | GGAUCUUCUCAUUGGAGAG | 1789 | CUCUCCAAUGAGAAGAUCC |
| siRNA 650 | 650 | GAUCUUCUCAUUGGAGAGG | 1790 | CCUCUCCAAUGAGAAGAUC |
| siRNA 651 | 651 | AUCUUCUCAUUGGAGAGGA | 1791 | UCCUCUCCAAUGAGAAGAU |
| siRNA 652 | 652 | UCUUCUCAUUGGAGAGGAU | 1792 | AUCCUCUCCAAUGAGAAGA |
| siRNA 653 | 653 | CUUCUCAUUGGAGAGGAUA | 1793 | UAUCCUCUCCAAUGAGAAG |
| siRNA 654 | 654 | UUCUCAUUGGAGAGGAUAA | 1794 | UUAUCCUCUCCAAUGAGAA |
| siRNA 655 | 655 | UCUCAUUGGAGAGGAUAAA | 1795 | UUUAUCCUCUCCAAUGAGA |
| siRNA 656 | 656 | CUCAUUGGAGAGGAUAAAG | 1796 | CUUUAUCCUCUCCAAUGAG |
| siRNA 657 | 657 | UCAUUGGAGAGGAUAAAGA | 1797 | UCUUUAUCCUCUCCAAUGA |
| siRNA 658 | 658 | CAUUGGAGAGGAUAAAGAA | 1798 | UUCUUUAUCCUCUCCAAUG |
| siRNA 659 | 659 | AUUGGAGAGGAUAAAGAAG | 1799 | CUUCUUUAUCCUCUCCAAU |
| siRNA 660 | 660 | UUGGAGAGGAUAAAGAAGC | 1800 | GCUUCUUUAUCCUCUCCAA |
| siRNA 661 | 661 | UGGAGAGGAUAAAGAAGCA | 1801 | UGCUUCUUUAUCCUCUCCA |
| siRNA 662 | 662 | GGAGAGGAUAAAGAAGCAG | 1802 | CUGCUUCUUUAUCCUCUCC |
| siRNA 663 | 663 | GAGAGGAUAAAGAAGCAGG | 1803 | CCUGCUUCUUUAUCCUCUC |
| siRNA 664 | 664 | AGAGGAUAAAGAAGCAGGA | 1804 | UCCUGCUUCUUUAUCCUCU |
| siRNA 665 | 665 | GAGGAUAAAGAAGCAGGAA | 1805 | UUCCUGCUUCUUUAUCCUC |
| siRNA 666 | 666 | AGGAUAAAGAAGCAGGAAC | 1806 | GUUCCUGCUUCUUUAUCCU |
| siRNA 667 | 667 | GGAUAAAGAAGCAGGAACA | 1807 | UGUUCCUGCUUCUUUAUCC |
| siRNA 668 | 668 | GAUAAAGAAGCAGGAACAG | 1808 | CUGUUCCUGCUUCUUUAUC |
| siRNA 669 | 669 | AUAAAGAAGCAGGAACAGA | 1809 | UCUGUUCCUGCUUCUUUAU |
| siRNA 670 | 670 | UAAAGAAGCAGGAACAGAG | 1810 | CUCUGUUCCUGCUUCUUUA |
| siRNA 671 | 671 | AAAGAAGCAGGAACAGAGA | 1811 | UCUCUGUUCCUGCUUCUUU |
| siRNA 672 | 672 | AAGAAGCAGGAACAGAGAC | 1812 | GUCUCUGUUCCUGCUUCUU |
| siRNA 673 | 673 | AGAAGCAGGAACAGAGACA | 1813 | UGUCUCUGUUCCUGCUUCU |
| siRNA 674 | 674 | GAAGCAGGAACAGAGACAG | 1814 | CUGUCUCUGUUCCUGCUUC |
| siRNA 675 | 675 | AAGCAGGAACAGAGACAGU | 1815 | ACUGUCUCUGUUCCUGCUU |
| siRNA 676 | 676 | AGCAGGAACAGAGACAGUU | 1816 | AACUGUCUCUGUUCCUGCU |
| siRNA 677 | 677 | GCAGGAACAGAGACAGUUA | 1817 | UAACUGUCUCUGUUCCUGC |
| siRNA 678 | 678 | CAGGAACAGAGACAGUUAU | 1818 | AUAACUGUCUCUGUUCCUG |
| siRNA 679 | 679 | AGGAACAGAGACAGUUAUG | 1819 | CAUAACUGUCUCUGUUCCU |
| siRNA 680 | 680 | GGAACAGAGACAGUUAUGC | 1820 | GCAUAACUGUCUCUGUUCC |
| siRNA 681 | 681 | GAACAGAGACAGUUAUGCG | 1821 | CGCAUAACUGUCUCUGUUC |
| siRNA 682 | 682 | AACAGAGACAGUUAUGCGG | 1822 | CCGCAUAACUGUCUCUGUU |
| siRNA 683 | 683 | ACAGAGACAGUUAUGCGGA | 1823 | UCCGCAUAACUGUCUCUGU |
| siRNA 684 | 684 | CAGAGACAGUUAUGCGGAU | 1824 | AUCCGCAUAACUGUCUCUG |
| siRNA 685 | 685 | AGAGACAGUUAUGCGGAUU | 1825 | AAUCCGCAUAACUGUCUCU |
| siRNA 686 | 686 | GAGACAGUUAUGCGGAUUC | 1826 | GAAUCCGCAUAACUGUCUC |
| siRNA 687 | 687 | AGACAGUUAUGCGGAUUCU | 1827 | AGAAUCCGCAUAACUGUCU |
| siRNA 688 | 688 | GACAGUUAUGCGGAUUCUC | 1828 | GAGAAUCCGCAUAACUGUC |
| siRNA 689 | 689 | ACAGUUAUGCGGAUUCUCU | 1829 | AGAGAAUCCGCAUAACUGU |
| siRNA 690 | 690 | CAGUUAUGCGGAUUCUCUU | 1830 | AAGAGAAUCCGCAUAACUG |
| siRNA 691 | 691 | AGUUAUGCGGAUUCUCUUG | 1831 | CAAGAGAAUCCGCAUAACU |
| siRNA 692 | 692 | GUUAUGCGGAUUCUCUUGA | 1832 | UCAAGAGAAUCCGCAUAAC |
| siRNA 693 | 693 | UUAUGCGGAUUCUCUUGAA | 1833 | UUCAAGAGAAUCCGCAUAA |
| siRNA 694 | 694 | UAUGCGGAUUCUCUUGAAA | 1834 | UUUCAAGAGAAUCCGCAUA |
| siRNA 695 | 695 | AUGCGGAUUCUCUUGAAAA | 1835 | UUUUCAAGAGAAUCCGCAU |
| siRNA 696 | 696 | UGCGGAUUCUCUUGAAAAA | 1836 | UUUUUCAAGAGAAUCCGCA |
| siRNA 697 | 697 | GCGGAUUCUCUUGAAAAAA | 1837 | UUUUUUCAAGAGAAUCCGC |
| siRNA 698 | 698 | CGGAUUCUCUUGAAAAAAG | 1838 | CUUUUUUCAAGAGAAUCCG |
| siRNA 699 | 699 | GGAUUCUCUUGAAAAAAGU | 1839 | ACUUUUUUCAAGAGAAUCC |
| siRNA 700 | 700 | GAUUCUCUUGAAAAAAGUG | 1840 | CACUUUUUUCAAGAGAAUC |
| siRNA 701 | 701 | AUUCUCUUGAAAAAAGUGU | 1841 | ACACUUUUUUCAAGAGAAU |
| siRNA 702 | 702 | UUCUCUUGAAAAAAGUGUU | 1842 | AACACUUUUUUCAAGAGAA |
| siRNA 703 | 703 | UCUCUUGAAAAAAGUGUUU | 1843 | AAACACUUUUUUCAAGAGA |
| siRNA 704 | 704 | CUCUUGAAAAAAGUGUUUG | 1844 | CAAACACUUUUUUCAAGAG |
| siRNA 705 | 705 | UCUUGAAAAAAGUGUUUGA | 1845 | UCAAACACUUUUUUCAAGA |
| siRNA 706 | 706 | CUUGAAAAAAGUGUUUGAA | 1846 | UUCAAACACUUUUUUCAAG |
| siRNA 707 | 707 | UUGAAAAAAGUGUUUGAAG | 1847 | CUUCAAACACUUUUUUCAA |
| siRNA 708 | 708 | UGAAAAAAGUGUUUGAAGA | 1848 | UCUUCAAACACUUUUUUCA |
| siRNA 709 | 709 | GAAAAAAGUGUUUGAAGAG | 1849 | CUCUUCAAACACUUUUUUC |
| siRNA 710 | 710 | AAAAAAGUGUUUGAAGAGA | 1850 | UCUCUUCAAACACUUUUUU |
| siRNA 711 | 711 | AAAAAGUGUUUGAAGAGAA | 1851 | UUCUCUUCAAACACUUUUU |
| siRNA 712 | 712 | AAAAGUGUUUGAAGAGAAG | 1852 | CUUCUCUUCAAACACUUUU |
| siRNA 713 | 713 | AAAGUGUUUGAAGAGAAGA | 1853 | UCUUCUCUUCAAACACUUU |
| siRNA 714 | 714 | AAGUGUUUGAAGAGAAGAC | 1854 | GUCUUCUCUUCAAACACUU |
| siRNA 715 | 715 | AGUGUUUGAAGAGAAGACU | 1855 | AGUCUUCUCUUCAAACACU |
| siRNA 716 | 716 | GUGUUUGAAGAGAAGACUG | 1856 | CAGUCUUCUCUUCAAACAC |
| siRNA 717 | 717 | UGUUUGAAGAGAAGACUGA | 1857 | UCAGUCUUCUCUUCAAACA |
| siRNA 718 | 718 | GUUUGAAGAGAAGACUGAA | 1858 | UUCAGUCUUCUCUUCAAAC |
| siRNA 719 | 719 | UUUGAAGAGAAGACUGAAA | 1859 | UUUCAGUCUUCUCUUCAAA |
| siRNA 720 | 720 | UUGAAGAGAAGACUGAAAG | 1860 | CUUUCAGUCUUCUCUUCAA |
| siRNA 721 | 721 | UGAAGAGAAGACUGAAAGU | 1861 | ACUUUCAGUCUUCUCUUCA |
| siRNA 722 | 722 | GAAGAGAAGACUGAAAGUG | 1862 | CACUUUCAGUCUUCUCUUC |
| siRNA 723 | 723 | AAGAGAAGACUGAAAGUGA | 1863 | UCACUUUCAGUCUUCUCUU |
| siRNA 724 | 724 | AGAGAAGACUGAAAGUGAA | 1864 | UUCACUUUCAGUCUUCUCU |
| siRNA 725 | 725 | GAGAAGACUGAAAGUGAAA | 1865 | UUUCACUUUCAGUCUUCUC |
| siRNA 726 | 726 | AGAAGACUGAAAGUGAAAA | 1866 | UUUUCACUUUCAGUCUUCU |
| siRNA 727 | 727 | GAAGACUGAAAGUGAAAAA | 1867 | UUUUUCACUUUCAGUCUUC |
| siRNA 728 | 728 | AAGACUGAAAGUGAAAAAU | 1868 | AUUUUUCACUUUCAGUCUU |
| siRNA 729 | 729 | AGACUGAAAGUGAAAAAUA | 1869 | UAUUUUUCACUUUCAGUCU |
| siRNA 730 | 730 | GACUGAAAGUGAAAAAUAC | 1870 | GUAUUUUUCACUUUCAGUC |
| siRNA 731 | 731 | ACUGAAAGUGAAAAAUACA | 1871 | UGUAUUUUUCACUUUCAGU |
| siRNA 732 | 732 | CUGAAAGUGAAAAAUACAG | 1872 | CUGUAUUUUUCACUUUCAG |
| siRNA 733 | 733 | UGAAAGUGAAAAAUACAGA | 1873 | UCUGUAUUUUUCACUUUCA |
| siRNA 734 | 734 | GAAAGUGAAAAAUACAGAG | 1874 | CUCUGUAUUUUUCACUUUC |
| siRNA 735 | 735 | AAAGUGAAAAAUACAGAGU | 1875 | ACUCUGUAUUUUUCACUUU |
| siRNA 736 | 736 | AAGUGAAAAAUACAGAGUG | 1876 | CACUCUGUAUUUUUCACUU |
| siRNA 737 | 737 | AGUGAAAAAUACAGAGUGG | 1877 | CCACUCUGUAUUUUUCACU |
| siRNA 738 | 738 | GUGAAAAAUACAGAGUGGU | 1878 | ACCACUCUGUAUUUUUCAC |
| siRNA 739 | 739 | UGAAAAAUACAGAGUGGUG | 1879 | CACCACUCUGUAUUUUUCA |
| siRNA 740 | 740 | GAAAAAUACAGAGUGGUGU | 1880 | ACACCACUCUGUAUUUUUC |
| siRNA 741 | 741 | AAAAAUACAGAGUGGUGUU | 1881 | AACACCACUCUGUAUUUUU |
| siRNA 742 | 742 | AAAAUACAGAGUGGUGUUA | 1882 | UAACACCACUCUGUAUUUU |
| siRNA 743 | 743 | AAAUACAGAGUGGUGUUAC | 1883 | GUAACACCACUCUGUAUUU |
| siRNA 744 | 744 | AAUACAGAGUGGUGUUACG | 1884 | CGUAACACCACUCUGUAUU |
| siRNA 745 | 745 | AUACAGAGUGGUGUUACGG | 1885 | CCGUAACACCACUCUGUAU |
| siRNA 746 | 746 | UACAGAGUGGUGUUACGGC | 1886 | GCCGUAACACCACUCUGUA |
| siRNA 747 | 747 | ACAGAGUGGUGUUACGGCG | 1887 | CGCCGUAACACCACUCUGU |
| siRNA 748 | 748 | CAGAGUGGUGUUACGGCGG | 1888 | CCGCCGUAACACCACUCUG |
| siRNA 749 | 749 | AGAGUGGUGUUACGGCGGU | 1889 | ACCGCCGUAACACCACUCU |
| siRNA 750 | 750 | GAGUGGUGUUACGGCGGUG | 1890 | CACCGCCGUAACACCACUC |
| siRNA 751 | 751 | AGUGGUGUUACGGCGGUGG | 1891 | CCACCGCCGUAACACCACU |
| siRNA 752 | 752 | GUGGUGUUACGGCGGUGGA | 1892 | UCCACCGCCGUAACACCAC |
| siRNA 753 | 753 | UGGUGUUACGGCGGUGGAA | 1893 | UUCCACCGCCGUAACACCA |
| siRNA 754 | 754 | GGUGUUACGGCGGUGGAAA | 1894 | UUUCCACCGCCGUAACACC |
| siRNA 755 | 755 | GUGUUACGGCGGUGGAAAA | 1895 | UUUUCCACCGCCGUAACAC |
| siRNA 756 | 756 | UGUUACGGCGGUGGAAAAG | 1896 | CUUUUCCACCGCCGUAACA |
| siRNA 757 | 757 | GUUACGGCGGUGGAAAAGU | 1897 | ACUUUUCCACCGCCGUAAC |
| SIRNA 758 | 758 | UUACGGCGGUGGAAAAGUU | 1898 | AACUUUUCCACCGCCGUAA |
| siRNA 759 | 759 | UACGGCGGUGGAAAAGUUU | 1899 | AAACUUUUCCACCGCCGUA |
| siRNA 760 | 760 | ACGGCGGUGGAAAAGUUUA | 1900 | UAAACUUUUCCACCGCCGU |
| siRNA 761 | 761 | CGGCGGUGGAAAAGUUUAA | 1901 | UUAAACUUUUCCACCGCCG |
| siRNA 762 | 762 | GGCGGUGGAAAAGUUUAAA | 1902 | UUUAAACUUUUCCACCGCC |
| siRNA 763 | 763 | GCGGUGGAAAAGUUUAAAG | 1903 | CUUUAAACUUUUCCACCGC |
| siRNA 764 | 764 | CGGUGGAAAAGUUUAAAGU | 1904 | ACUUUAAACUUUUCCACCG |
| siRNA 765 | 765 | GGUGGAAAAGUUUAAAGUU | 1905 | AACUUUAAACUUUUCCACC |
| siRNA 766 | 766 | GUGGAAAAGUUUAAAGUUG | 1906 | CAACUUUAAACUUUUCCAC |
| siRNA 767 | 767 | UGGAAAAGUUUAAAGUUGC | 1907 | GCAACUUUAAACUUUUCCA |
| siRNA 768 | 768 | GGAAAAGUUUAAAGUUGCC | 1908 | GGCAACUUUAAACUUUUCC |
| siRNA 769 | 769 | GAAAAGUUUAAAGUUGCCU | 1909 | AGGCAACUUUAAACUUUUC |
| siRNA 770 | 770 | AAAAGUUUAAAGUUGCCUA | 1910 | UAGGCAACUUUAAACUUUU |
| siRNA 771 | 771 | AAAGUUUAAAGUUGCCUAA | 1911 | UUAGGCAACUUUAAACUUU |
| siRNA 772 | 772 | AAGUUUAAAGUUGCCUAAG | 1912 | CUUAGGCAACUUUAAACUU |
| siRNA 773 | 773 | AGUUUAAAGUUGCCUAAGA | 1913 | UCUUAGGCAACUUUAAACU |
| siRNA 774 | 774 | GUUUAAAGUUGCCUAAGAA | 1914 | UUCUUAGGCAACUUUAAAC |
| siRNA 775 | 775 | UUUAAAGUUGCCUAAGAAG | 1915 | CUUCUUAGGCAACUUUAAA |
| siRNA 776 | 776 | UUAAAGUUGCCUAAGAAGA | 1916 | UCUUCUUAGGCAACUUUAA |
| siRNA 777 | 777 | UAAAGUUGCCUAAGAAGAG | 1917 | CUCUUCUUAGGCAACUUUA |
| siRNA 778 | 778 | AAAGUUGCCUAAGAAGAGA | 1918 | UCUCUUCUUAGGCAACUUU |
| siRNA 779 | 779 | AAGUUGCCUAAGAAGAGAA | 1919 | UUCUCUUCUUAGGCAACUU |
| siRNA 780 | 780 | AGUUGCCUAAGAAGAGAAU | 1920 | AUUCUCUUCUUAGGCAACU |
| siRNA 781 | 781 | GUUGCCUAAGAAGAGAAUG | 1921 | CAUUCUCUUCUUAGGCAAC |
| siRNA 782 | 782 | UUGCCUAAGAAGAGAAUGU | 1922 | ACAUUCUCUUCUUAGGCAA |
| siRNA 783 | 783 | UGCCUAAGAAGAGAAUGUC | 1923 | GACAUUCUCUUCUUAGGCA |
| siRNA 784 | 784 | GCCUAAGAAGAGAAUGUCU | 1924 | AGACAUUCUCUUCUUAGGC |
| siRNA 785 | 785 | CCUAAGAAGAGAAUGUCUA | 1925 | UAGACAUUCUCUUCUUAGG |
| siRNA 786 | 786 | CUAAGAAGAGAAUGUCUAA | 1926 | UUAGACAUUCUCUUCUUAG |
| siRNA 787 | 787 | UAAGAAGAGAAUGUCUAAA | 1927 | UUUAGACAUUCUCUUCUUA |
| siRNA 788 | 788 | AAGAAGAGAAUGUCUAAAU | 1928 | AUUUAGACAUUCUCUUCUU |
| siRNA 789 | 789 | AGAAGAGAAUGUCUAAAUA | 1929 | UAUUUAGACAUUCUCUUCU |
| siRNA 790 | 790 | GAAGAGAAUGUCUAAAUAA | 1930 | UUAUUUAGACAUUCUCUUC |
| siRNA 791 | 791 | AAGAGAAUGUCUAAAUAAA | 1931 | UUUAUUUAGACAUUCUCUU |
| siRNA 792 | 792 | AGAGAAUGUCUAAAUAAAU | 1932 | AUUUAUUUAGACAUUCUCU |
| siRNA 793 | 793 | GAGAAUGUCUAAAUAAAUG | 1933 | CAUUUAUUUAGACAUUCUC |
| siRNA 794 | 794 | AGAAUGUCUAAAUAAAUGG | 1934 | CCAUUUAUUUAGACAUUCU |
| siRNA 795 | 795 | GAAUGUCUAAAUAAAUGGA | 1935 | UCCAUUUAUUUAGACAUUC |
| siRNA 796 | 796 | AAUGUCUAAAUAAAUGGAU | 1936 | AUCCAUUUAUUUAGACAUU |
| siRNA 797 | 797 | AUGUCUAAAUAAAUGGAUU | 1937 | AAUCCAUUUAUUUAGACAU |
| siRNA 798 | 798 | UGUCUAAAUAAAUGGAUUG | 1938 | CAAUCCAUUUAUUUAGACA |
| siRNA 799 | 799 | GUCUAAAUAAAUGGAUUGC | 1939 | GCAAUCCAUUUAUUUAGAC |
| siRNA 800 | 800 | UCUAAAUAAAUGGAUUGCU | 1940 | AGCAAUCCAUUUAUUUAGA |
| siRNA 801 | 801 | CUAAAUAAAUGGAUUGCUU | 1941 | AAGCAAUCCAUUUAUUUAG |
| siRNA 802 | 802 | UAAAUAAAUGGAUUGCUUU | 1942 | AAAGCAAUCCAUUUAUUUA |
| siRNA 803 | 803 | AAAUAAAUGGAUUGCUUUU | 1943 | AAAAGCAAUCCAUUUAUUU |
| siRNA 804 | 804 | AAUAAAUGGAUUGCUUUUU | 1944 | AAAAAGCAAUCCAUUUAUU |
| siRNA 805 | 805 | AUAAAUGGAUUGCUUUUUA | 1945 | UAAAAAGCAAUCCAUUUAU |
| siRNA 806 | 806 | UAAAUGGAUUGCUUUUUAG | 1946 | CUAAAAAGCAAUCCAUUUA |
| siRNA 807 | 807 | AAAUGGAUUGCUUUUUAGC | 1947 | GCUAAAAAGCAAUCCAUUU |
| siRNA 808 | 808 | AAUGGAUUGCUUUUUAGCA | 1948 | UGCUAAAAAGCAAUCCAUU |
| siRNA 809 | 809 | AUGGAUUGCUUUUUAGCAA | 1949 | UUGCUAAAAAGCAAUCCAU |
| siRNA 810 | 810 | UGGAUUGCUUUUUAGCAAU | 1950 | AUUGCUAAAAAGCAAUCCA |
| siRNA 811 | 811 | GGAUUGCUUUUUAGCAAUA | 1951 | UAUUGCUAAAAAGCAAUCC |
| siRNA 812 | 812 | GAUUGCUUUUUAGCAAUAG | 1952 | CUAUUGCUAAAAAGCAAUC |
| siRNA 813 | 813 | AUUGCUUUUUAGCAAUAGA | 1953 | UCUAUUGCUAAAAAGCAAU |
| siRNA 814 | 814 | UUGCUUUUUAGCAAUAGAG | 1954 | CUCUAUUGCUAAAAAGCAA |
| siRNA 815 | 815 | UGCUUUUUAGCAAUAGAGC | 1955 | GCUCUAUUGCUAAAAAGCA |
| siRNA 816 | 816 | GCUUUUUAGCAAUAGAGCU | 1956 | AGCUCUAUUGCUAAAAAGC |
| siRNA 817 | 817 | CUUUUUAGCAAUAGAGCUG | 1957 | CAGCUCUAUUGCUAAAAAG |
| siRNA 818 | 818 | UUUUUAGCAAUAGAGCUGC | 1958 | GCAGCUCUAUUGCUAAAAA |
| siRNA 819 | 819 | UUUUAGCAAUAGAGCUGCU | 1959 | AGCAGCUCUAUUGCUAAAA |
| siRNA 820 | 820 | UUUAGCAAUAGAGCUGCUU | 1960 | AAGCAGCUCUAUUGCUAAA |
| siRNA 821 | 821 | UUAGCAAUAGAGCUGCUUU | 1961 | AAAGCAGCUCUAUUGCUAA |
| siRNA 822 | 822 | UAGCAAUAGAGCUGCUUUC | 1962 | GAAAGCAGCUCUAUUGCUA |
| SIRNA 823 | 823 | AGCAAUAGAGCUGCUUUCU | 1963 | AGAAAGCAGCUCUAUUGCU |
| siRNA 824 | 824 | GCAAUAGAGCUGCUUUCUA | 1964 | UAGAAAGCAGCUCUAUUGC |
| siRNA 825 | 825 | CAAUAGAGCUGCUUUCUAG | 1965 | CUAGAAAGCAGCUCUAUUG |
| siRNA 826 | 826 | AAUAGAGCUGCUUUCUAGU | 1966 | ACUAGAAAGCAGCUCUAUU |
| siRNA 827 | 827 | AUAGAGCUGCUUUCUAGUG | 1967 | CACUAGAAAGCAGCUCUAU |
| siRNA 828 | 828 | UAGAGCUGCUUUCUAGUGG | 1968 | CCACUAGAAAGCAGCUCUA |
| siRNA 829 | 829 | AGAGCUGCUUUCUAGUGGU | 1969 | ACCACUAGAAAGCAGCUCU |
| siRNA 830 | 830 | GAGCUGCUUUCUAGUGGUA | 1970 | UACCACUAGAAAGCAGCUC |
| siRNA 831 | 831 | AGCUGCUUUCUAGUGGUAA | 1971 | UUACCACUAGAAAGCAGCU |
| siRNA 832 | 832 | GCUGCUUUCUAGUGGUAAA | 1972 | UUUACCACUAGAAAGCAGC |
| siRNA 833 | 833 | CUGCUUUCUAGUGGUAAAG | 1973 | CUUUACCACUAGAAAGCAG |
| siRNA 834 | 834 | UGCUUUCUAGUGGUAAAGG | 1974 | CCUUUACCACUAGAAAGCA |
| siRNA 835 | 835 | GCUUUCUAGUGGUAAAGGA | 1975 | UCCUUUACCACUAGAAAGC |
| siRNA 836 | 836 | CUUUCUAGUGGUAAAGGAA | 1976 | UUCCUUUACCACUAGAAAG |
| siRNA 837 | 837 | UUUCUAGUGGUAAAGGAAG | 1977 | CUUCCUUUACCACUAGAAA |
| siRNA 838 | 838 | UUCUAGUGGUAAAGGAAGG | 1978 | CCUUCCUUUACCACUAGAA |
| siRNA 839 | 839 | UCUAGUGGUAAAGGAAGGG | 1979 | CCCUUCCUUUACCACUAGA |
| siRNA 840 | 840 | CUAGUGGUAAAGGAAGGGG | 1980 | CCCCUUCCUUUACCACUAG |
| siRNA 841 | 841 | UAGUGGUAAAGGAAGGGGU | 1981 | ACCCCUUCCUUUACCACUA |
| siRNA 842 | 842 | AGUGGUAAAGGAAGGGGUC | 1982 | GACCCCUUCCUUUACCACU |
| siRNA 843 | 843 | GUGGUAAAGGAAGGGGUCA | 1983 | UGACCCCUUCCUUUACCAC |
| siRNA 844 | 844 | UGGUAAAGGAAGGGGUCAC | 1984 | GUGACCCCUUCCUUUACCA |
| siRNA 845 | 845 | GGUAAAGGAAGGGGUCACC | 1985 | GGUGACCCCUUCCUUUACC |
| siRNA 846 | 846 | GUAAAGGAAGGGGUCACCU | 1986 | AGGUGACCCCUUCCUUUAC |
| siRNA 847 | 847 | UAAAGGAAGGGGUCACCUG | 1987 | CAGGUGACCCCUUCCUUUA |
| siRNA 848 | 848 | AAAGGAAGGGGUCACCUGA | 1988 | UCAGGUGACCCCUUCCUUU |
| siRNA 849 | 849 | AAGGAAGGGGUCACCUGAA | 1989 | UUCAGGUGACCCCUUCCUU |
| siRNA 850 | 850 | AGGAAGGGGUCACCUGAAA | 1990 | UUUCAGGUGACCCCUUCCU |
| siRNA 851 | 851 | GGAAGGGGUCACCUGAAAA | 1991 | UUUUCAGGUGACCCCUUCC |
| siRNA 852 | 852 | GAAGGGGUCACCUGAAAAA | 1992 | UUUUUCAGGUGACCCCUUC |
| siRNA 853 | 853 | AAGGGGUCACCUGAAAAAU | 1993 | AUUUUUCAGGUGACCCCUU |
| siRNA 854 | 854 | AGGGGUCACCUGAAAAAUA | 1994 | UAUUUUUCAGGUGACCCCU |
| siRNA 855 | 855 | GGGGUCACCUGAAAAAUAG | 1995 | CUAUUUUUCAGGUGACCCC |
| siRNA 856 | 856 | GGGUCACCUGAAAAAUAGG | 1996 | CCUAUUUUUCAGGUGACCC |
| siRNA 857 | 857 | GGUCACCUGAAAAAUAGGA | 1997 | UCCUAUUUUUCAGGUGACC |
| siRNA 858 | 858 | GUCACCUGAAAAAUAGGAC | 1998 | GUCCUAUUUUUCAGGUGAC |
| siRNA 859 | 859 | UCACCUGAAAAAUAGGACA | 1999 | UGUCCUAUUUUUCAGGUGA |
| siRNA 860 | 860 | CACCUGAAAAAUAGGACAU | 2000 | AUGUCCUAUUUUUCAGGUG |
| siRNA 861 | 861 | ACCUGAAAAAUAGGACAUU | 2001 | AAUGUCCUAUUUUUCAGGU |
| siRNA 862 | 862 | CCUGAAAAAUAGGACAUUU | 2002 | AAAUGUCCUAUUUUUCAGG |
| siRNA 863 | 863 | CUGAAAAAUAGGACAUUUU | 2003 | AAAAUGUCCUAUUUUUCAG |
| siRNA 864 | 864 | UGAAAAAUAGGACAUUUUU | 2004 | AAAAAUGUCCUAUUUUUCA |
| siRNA 865 | 865 | GAAAAAUAGGACAUUUUUA | 2005 | UAAAAAUGUCCUAUUUUUC |
| siRNA 866 | 866 | AAAAAUAGGACAUUUUUAU | 2006 | AUAAAAAUGUCCUAUUUUU |
| siRNA 867 | 867 | AAAAUAGGACAUUUUUAUU | 2007 | AAUAAAAAUGUCCUAUUUU |
| siRNA 868 | 868 | AAAUAGGACAUUUUUAUUA | 2008 | UAAUAAAAAUGUCCUAUUU |
| siRNA 869 | 869 | AAUAGGACAUUUUUAUUAA | 2009 | UUAAUAAAAAUGUCCUAUU |
| siRNA 870 | 870 | AUAGGACAUUUUUAUUAAA | 2010 | UUUAAUAAAAAUGUCCUAU |
| siRNA 871 | 871 | UAGGACAUUUUUAUUAAAA | 2011 | UUUUAAUAAAAAUGUCCUA |
| siRNA 872 | 872 | AGGACAUUUUUAUUAAAAU | 2012 | AUUUUAAUAAAAAUGUCCU |
| siRNA 873 | 873 | GGACAUUUUUAUUAAAAUA | 2013 | UAUUUUAAUAAAAAUGUCC |
| siRNA 874 | 874 | GACAUUUUUAUUAAAAUAA | 2014 | UUAUUUUAAUAAAAAUGUC |
| siRNA 875 | 875 | ACAUUUUUAUUAAAAUAAA | 2015 | UUUAUUUUAAUAAAAAUGU |
| siRNA 876 | 876 | CAUUUUUAUUAAAAUAAAG | 2016 | CUUUAUUUUAAUAAAAAUG |
| siRNA 877 | 877 | AUUUUUAUUAAAAUAAAGU | 2017 | ACUUUAUUUUAAUAAAAAU |
| siRNA 878 | 878 | UUUUUAUUAAAAUAAAGUU | 2018 | AACUUUAUUUUAAUAAAAA |
| siRNA 879 | 879 | UUUUAUUAAAAUAAAGUUC | 2019 | GAACUUUAUUUUAAUAAAA |
| siRNA 880 | 880 | UUUAUUAAAAUAAAGUUCU | 2020 | AGAACUUUAUUUUAAUAAA |
| siRNA 881 | 881 | UUAUUAAAAUAAAGUUCUC | 2021 | GAGAACUUUAUUUUAAUAA |
| siRNA 882 | 882 | UAUUAAAAUAAAGUUCUCU | 2022 | AGAGAACUUUAUUUUAAUA |
| siRNA 883 | 883 | AUUAAAAUAAAGUUCUCUU | 2023 | AAGAGAACUUUAUUUUAAU |
| siRNA 884 | 884 | UUAAAAUAAAGUUCUCUUA | 2024 | UAAGAGAACUUUAUUUUAA |
| siRNA 885 | 885 | UAAAAUAAAGUUCUCUUAG | 2025 | CUAAGAGAACUUUAUUUUA |
| siRNA 886 | 886 | AAAAUAAAGUUCUCUUAGC | 2026 | GCUAAGAGAACUUUAUUUU |
| siRNA 887 | 887 | AAAUAAAGUUCUCUUAGCG | 2027 | CGCUAAGAGAACUUUAUUU |
| siRNA 888 | 888 | AAUAAAGUUCUCUUAGCGU | 2028 | ACGCUAAGAGAACUUUAUU |
| siRNA 889 | 889 | AUAAAGUUCUCUUAGCGUU | 2029 | AACGCUAAGAGAACUUUAU |
| siRNA 890 | 890 | UAAAGUUCUCUUAGCGUUU | 2030 | AAACGCUAAGAGAACUUUA |
| siRNA 891 | 891 | AAAGUUCUCUUAGCGUUUG | 2031 | CAAACGCUAAGAGAACUUU |
| siRNA 892 | 892 | AAGUUCUCUUAGCGUUUGU | 2032 | ACAAACGCUAAGAGAACUU |
| siRNA 893 | 893 | AGUUCUCUUAGCGUUUGUG | 2033 | CACAAACGCUAAGAGAACU |
| siRNA 894 | 894 | GUUCUCUUAGCGUUUGUGG | 2034 | CCACAAACGCUAAGAGAAC |
| siRNA 895 | 895 | UUCUCUUAGCGUUUGUGGA | 2035 | UCCACAAACGCUAAGAGAA |
| siRNA 896 | 896 | UCUCUUAGCGUUUGUGGAA | 2036 | UUCCACAAACGCUAAGAGA |
| siRNA 897 | 897 | CUCUUAGCGUUUGUGGAAU | 2037 | AUUCCACAAACGCUAAGAG |
| siRNA 898 | 898 | UCUUAGCGUUUGUGGAAUC | 2038 | GAUUCCACAAACGCUAAGA |
| siRNA 899 | 899 | CUUAGCGUUUGUGGAAUCU | 2039 | AGAUUCCACAAACGCUAAG |
| siRNA 900 | 900 | UUAGCGUUUGUGGAAUCUG | 2040 | CAGAUUCCACAAACGCUAA |
| siRNA 901 | 901 | UAGCGUUUGUGGAAUCUGC | 2041 | GCAGAUUCCACAAACGCUA |
| siRNA 902 | 902 | AGCGUUUGUGGAAUCUGCC | 2042 | GGCAGAUUCCACAAACGCU |
| siRNA 903 | 903 | GCGUUUGUGGAAUCUGCCG | 2043 | CGGCAGAUUCCACAAACGC |
| siRNA 904 | 904 | CGUUUGUGGAAUCUGCCGA | 2044 | UCGGCAGAUUCCACAAACG |
| siRNA 905 | 905 | GUUUGUGGAAUCUGCCGAG | 2045 | CUCGGCAGAUUCCACAAAC |
| siRNA 906 | 906 | UUUGUGGAAUCUGCCGAGC | 2046 | GCUCGGCAGAUUCCACAAA |
| siRNA 907 | 907 | UUGUGGAAUCUGCCGAGCC | 2047 | GGCUCGGCAGAUUCCACAA |
| siRNA 908 | 908 | UGUGGAAUCUGCCGAGCCA | 2048 | UGGCUCGGCAGAUUCCACA |
| siRNA 909 | 909 | GUGGAAUCUGCCGAGCCAU | 2049 | AUGGCUCGGCAGAUUCCAC |
| siRNA 910 | 910 | UGGAAUCUGCCGAGCCAUU | 2050 | AAUGGCUCGGCAGAUUCCA |
| siRNA 911 | 911 | GGAAUCUGCCGAGCCAUUU | 2051 | AAAUGGCUCGGCAGAUUCC |
| siRNA 912 | 912 | GAAUCUGCCGAGCCAUUUU | 2052 | AAAAUGGCUCGGCAGAUUC |
| siRNA 913 | 913 | AAUCUGCCGAGCCAUUUUG | 2053 | CAAAAUGGCUCGGCAGAUU |
| siRNA 914 | 914 | AUCUGCCGAGCCAUUUUGU | 2054 | ACAAAAUGGCUCGGCAGAU |
| siRNA 915 | 915 | UCUGCCGAGCCAUUUUGUG | 2055 | CACAAAAUGGCUCGGCAGA |
| siRNA 916 | 916 | CUGCCGAGCCAUUUUGUGG | 2056 | CCACAAAAUGGCUCGGCAG |
| siRNA 917 | 917 | UGCCGAGCCAUUUUGUGGA | 2057 | UCCACAAAAUGGCUCGGCA |
| siRNA 918 | 918 | GCCGAGCCAUUUUGUGGAA | 2058 | UUCCACAAAAUGGCUCGGC |
| siRNA 919 | 919 | CCGAGCCAUUUUGUGGAAA | 2059 | UUUCCACAAAAUGGCUCGG |
| siRNA 920 | 920 | CGAGCCAUUUUGUGGAAAU | 2060 | AUUUCCACAAAAUGGCUCG |
| siRNA 921 | 921 | GAGCCAUUUUGUGGAAAUU | 2061 | AAUUUCCACAAAAUGGCUC |
| siRNA 922 | 922 | AGCCAUUUUGUGGAAAUUG | 2062 | CAAUUUCCACAAAAUGGCU |
| siRNA 923 | 923 | GCCAUUUUGUGGAAAUUGG | 2063 | CCAAUUUCCACAAAAUGGC |
| siRNA 924 | 924 | CCAUUUUGUGGAAAUUGGG | 2064 | CCCAAUUUCCACAAAAUGG |
| siRNA 925 | 925 | CAUUUUGUGGAAAUUGGGA | 2065 | UCCCAAUUUCCACAAAAUG |
| siRNA 926 | 926 | AUUUUGUGGAAAUUGGGAU | 2066 | AUCCCAAUUUCCACAAAAU |
| SIRNA 927 | 927 | UUUUGUGGAAAUUGGGAUC | 2067 | GAUCCCAAUUUCCACAAAA |
| siRNA 928 | 928 | UUUGUGGAAAUUGGGAUCC | 2068 | GGAUCCCAAUUUCCACAAA |
| siRNA 929 | 929 | UUGUGGAAAUUGGGAUCCA | 2069 | UGGAUCCCAAUUUCCACAA |
| siRNA 930 | 930 | UGUGGAAAUUGGGAUCCAU | 2070 | AUGGAUCCCAAUUUCCACA |
| siRNA 931 | 931 | GUGGAAAUUGGGAUCCAUA | 2071 | UAUGGAUCCCAAUUUCCAC |
| siRNA 932 | 932 | UGGAAAUUGGGAUCCAUAU | 2072 | AUAUGGAUCCCAAUUUCCA |
| siRNA 933 | 933 | GGAAAUUGGGAUCCAUAUC | 2073 | GAUAUGGAUCCCAAUUUCC |
| siRNA 934 | 934 | GAAAUUGGGAUCCAUAUCU | 2074 | AGAUAUGGAUCCCAAUUUC |
| siRNA 935 | 935 | AAAUUGGGAUCCAUAUCUG | 2075 | CAGAUAUGGAUCCCAAUUU |
| siRNA 936 | 936 | AAUUGGGAUCCAUAUCUGG | 2076 | CCAGAUAUGGAUCCCAAUU |
| siRNA 937 | 937 | AUUGGGAUCCAUAUCUGGA | 2077 | UCCAGAUAUGGAUCCCAAU |
| siRNA 938 | 938 | UUGGGAUCCAUAUCUGGAG | 2078 | CUCCAGAUAUGGAUCCCAA |
| siRNA 939 | 939 | UGGGAUCCAUAUCUGGAGA | 2079 | UCUCCAGAUAUGGAUCCCA |
| siRNA 940 | 940 | GGGAUCCAUAUCUGGAGAC | 2080 | GUCUCCAGAUAUGGAUCCC |
| siRNA 941 | 941 | GGAUCCAUAUCUGGAGACA | 2081 | UGUCUCCAGAUAUGGAUCC |
| siRNA 942 | 942 | GAUCCAUAUCUGGAGACAC | 2082 | GUGUCUCCAGAUAUGGAUC |
| siRNA 943 | 943 | AUCCAUAUCUGGAGACACU | 2083 | AGUGUCUCCAGAUAUGGAU |
| siRNA 944 | 944 | UCCAUAUCUGGAGACACUU | 2084 | AAGUGUCUCCAGAUAUGGA |
| siRNA 945 | 945 | CCAUAUCUGGAGACACUUC | 2085 | GAAGUGUCUCCAGAUAUGG |
| siRNA 946 | 946 | CAUAUCUGGAGACACUUCC | 2086 | GGAAGUGUCUCCAGAUAUG |
| siRNA 947 | 947 | AUAUCUGGAGACACUUCCC | 2087 | GGGAAGUGUCUCCAGAUAU |
| siRNA 948 | 948 | UAUCUGGAGACACUUCCCA | 2088 | UGGGAAGUGUCUCCAGAUA |
| siRNA 949 | 949 | AUCUGGAGACACUUCCCAA | 2089 | UUGGGAAGUGUCUCCAGAU |
| siRNA 950 | 950 | UCUGGAGACACUUCCCAAG | 2090 | CUUGGGAAGUGUCUCCAGA |
| siRNA 951 | 951 | CUGGAGACACUUCCCAAGG | 2091 | CCUUGGGAAGUGUCUCCAG |
| siRNA 952 | 952 | UGGAGACACUUCCCAAGGC | 2092 | GCCUUGGGAAGUGUCUCCA |
| siRNA 953 | 953 | GGAGACACUUCCCAAGGCC | 2093 | GGCCUUGGGAAGUGUCUCC |
| siRNA 954 | 954 | GAGACACUUCCCAAGGCCU | 2094 | AGGCCUUGGGAAGUGUCUC |
| siRNA 955 | 955 | AGACACUUCCCAAGGCCUG | 2095 | CAGGCCUUGGGAAGUGUCU |
| siRNA 956 | 956 | GACACUUCCCAAGGCCUGC | 2096 | GCAGGCCUUGGGAAGUGUC |
| siRNA 957 | 957 | ACACUUCCCAAGGCCUGCC | 2097 | GGCAGGCCUUGGGAAGUGU |
| siRNA 958 | 958 | CACUUCCCAAGGCCUGCCU | 2098 | AGGCAGGCCUUGGGAAGUG |
| siRNA 959 | 959 | ACUUCCCAAGGCCUGCCUC | 2099 | GAGGCAGGCCUUGGGAAGU |
| siRNA 960 | 960 | CUUCCCAAGGCCUGCCUCA | 2100 | UGAGGCAGGCCUUGGGAAG |
| siRNA 961 | 961 | UUCCCAAGGCCUGCCUCAC | 2101 | GUGAGGCAGGCCUUGGGAA |
| siRNA 962 | 962 | UCCCAAGGCCUGCCUCACC | 2102 | GGUGAGGCAGGCCUUGGGA |
| siRNA 963 | 963 | CCCAAGGCCUGCCUCACCU | 2103 | AGGUGAGGCAGGCCUUGGG |
| siRNA 964 | 964 | CCAAGGCCUGCCUCACCUC | 2104 | GAGGUGAGGCAGGCCUUGG |
| siRNA 965 | 965 | CAAGGCCUGCCUCACCUCC | 2105 | GGAGGUGAGGCAGGCCUUG |
| siRNA 966 | 966 | AAGGCCUGCCUCACCUCCA | 2106 | UGGAGGUGAGGCAGGCCUU |
| siRNA 967 | 967 | AGGCCUGCCUCACCUCCAC | 2107 | GUGGAGGUGAGGCAGGCCU |
| siRNA 968 | 968 | GGCCUGCCUCACCUCCACC | 2108 | GGUGGAGGUGAGGCAGGCC |
| siRNA 969 | 969 | GCCUGCCUCACCUCCACCC | 2109 | GGGUGGAGGUGAGGCAGGC |
| siRNA 970 | 970 | CCUGCCUCACCUCCACCCC | 2110 | GGGGUGGAGGUGAGGCAGG |
| siRNA 971 | 971 | CUGCCUCACCUCCACCCCC | 2111 | GGGGGUGGAGGUGAGGCAG |
| siRNA 972 | 972 | UGCCUCACCUCCACCCCCU | 2112 | AGGGGGUGGAGGUGAGGCA |
| siRNA 973 | 973 | GCCUCACCUCCACCCCCUG | 2113 | CAGGGGGUGGAGGUGAGGC |
| siRNA 974 | 974 | CCUCACCUCCACCCCCUGC | 2114 | GCAGGGGGUGGAGGUGAGG |
| siRNA 975 | 975 | CUCACCUCCACCCCCUGCC | 2115 | GGCAGGGGGUGGAGGUGAG |
| siRNA 976 | 976 | UCACCUCCACCCCCUGCCC | 2116 | GGGCAGGGGGUGGAGGUGA |
| siRNA 977 | 977 | CACCUCCACCCCCUGCCCA | 2117 | UGGGCAGGGGGUGGAGGUG |
| siRNA 978 | 978 | ACCUCCACCCCCUGCCCAC | 2118 | GUGGGCAGGGGGUGGAGGU |
| siRNA 979 | 979 | CCUCCACCCCCUGCCCACC | 2119 | GGUGGGCAGGGGGUGGAGG |
| siRNA 980 | 980 | CUCCACCCCCUGCCCACCU | 2120 | AGGUGGGCAGGGGGUGGAG |
| siRNA 981 | 981 | UCCACCCCCUGCCCACCUU | 2121 | AAGGUGGGCAGGGGGUGGA |
| siRNA 982 | 982 | CCACCCCCUGCCCACCUUG | 2122 | CAAGGUGGGCAGGGGGUGG |
| siRNA 983 | 983 | CACCCCCUGCCCACCUUGA | 2123 | UCAAGGUGGGCAGGGGGUG |
| siRNA 984 | 984 | ACCCCCUGCCCACCUUGAU | 2124 | AUCAAGGUGGGCAGGGGGU |
| siRNA 985 | 985 | CCCCCUGCCCACCUUGAUC | 2125 | GAUCAAGGUGGGCAGGGGG |
| siRNA 986 | 986 | CCCCUGCCCACCUUGAUCC | 2126 | GGAUCAAGGUGGGCAGGGG |
| siRNA 987 | 987 | CCCUGCCCACCUUGAUCCA | 2127 | UGGAUCAAGGUGGGCAGGG |
| siRNA 988 | 988 | CCUGCCCACCUUGAUCCAU | 2128 | AUGGAUCAAGGUGGGCAGG |
| siRNA 989 | 989 | CUGCCCACCUUGAUCCAUG | 2129 | CAUGGAUCAAGGUGGGCAG |
| siRNA 990 | 990 | UGCCCACCUUGAUCCAUGC | 2130 | GCAUGGAUCAAGGUGGGCA |
| siRNA 991 | 991 | GCCCACCUUGAUCCAUGCU | 2131 | AGCAUGGAUCAAGGUGGGC |
| siRNA 992 | 992 | CCCACCUUGAUCCAUGCUC | 2132 | GAGCAUGGAUCAAGGUGGG |
| siRNA 993 | 993 | CCACCUUGAUCCAUGCUCC | 2133 | GGAGCAUGGAUCAAGGUGG |
| siRNA 994 | 994 | CACCUUGAUCCAUGCUCCU | 2134 | AGGAGCAUGGAUCAAGGUG |
| siRNA 995 | 995 | ACCUUGAUCCAUGCUCCUU | 2135 | AAGGAGCAUGGAUCAAGGU |
| siRNA 996 | 996 | CCUUGAUCCAUGCUCCUUU | 2136 | AAAGGAGCAUGGAUCAAGG |
| siRNA 997 | 997 | CUUGAUCCAUGCUCCUUUG | 2137 | CAAAGGAGCAUGGAUCAAG |
| siRNA 998 | 998 | UUGAUCCAUGCUCCUUUGA | 2138 | UCAAAGGAGCAUGGAUCAA |
| siRNA 999 | 999 | UGAUCCAUGCUCCUUUGAC | 2139 | GUCAAAGGAGCAUGGAUCA |
| siRNA 1000 | 1000 | GAUCCAUGCUCCUUUGACC | 2140 | GGUCAAAGGAGCAUGGAUC |
| siRNA 1001 | 1001 | AUCCAUGCUCCUUUGACCU | 2141 | AGGUCAAAGGAGCAUGGAU |
| siRNA 1002 | 1002 | UCCAUGCUCCUUUGACCUC | 2142 | GAGGUCAAAGGAGCAUGGA |
| siRNA 1003 | 1003 | CCAUGCUCCUUUGACCUCC | 2143 | GGAGGUCAAAGGAGCAUGG |
| siRNA 1004 | 1004 | CAUGCUCCUUUGACCUCCU | 2144 | AGGAGGUCAAAGGAGCAUG |
| siRNA 1005 | 1005 | AUGCUCCUUUGACCUCCUC | 2145 | GAGGAGGUCAAAGGAGCAU |
| siRNA 1006 | 1006 | UGCUCCUUUGACCUCCUCG | 2146 | CGAGGAGGUCAAAGGAGCA |
| siRNA 1007 | 1007 | GCUCCUUUGACCUCCUCGU | 2147 | ACGAGGAGGUCAAAGGAGC |
| siRNA 1008 | 1008 | CUCCUUUGACCUCCUCGUG | 2148 | CACGAGGAGGUCAAAGGAG |
| siRNA 1009 | 1009 | UCCUUUGACCUCCUCGUGU | 2149 | ACACGAGGAGGUCAAAGGA |
| siRNA 1010 | 1010 | CCUUUGACCUCCUCGUGUG | 2150 | CACACGAGGAGGUCAAAGG |
| siRNA 1011 | 1011 | CUUUGACCUCCUCGUGUGA | 2151 | UCACACGAGGAGGUCAAAG |
| siRNA 1012 | 1012 | UUUGACCUCCUCGUGUGAG | 2152 | CUCACACGAGGAGGUCAAA |
| siRNA 1013 | 1013 | UUGACCUCCUCGUGUGAGA | 2153 | UCUCACACGAGGAGGUCAA |
| siRNA 1014 | 1014 | UGACCUCCUCGUGUGAGAA | 2154 | UUCUCACACGAGGAGGUCA |
| siRNA 1015 | 1015 | GACCUCCUCGUGUGAGAAC | 2155 | GUUCUCACACGAGGAGGUC |
| siRNA 1016 | 1016 | ACCUCCUCGUGUGAGAACC | 2156 | GGUUCUCACACGAGGAGGU |
| SIRNA 1017 | 1017 | CCUCCUCGUGUGAGAACCC | 2157 | GGGUUCUCACACGAGGAGG |
| SiRNA 1018 | 1018 | CUCCUCGUGUGAGAACCCC | 2158 | GGGGUUCUCACACGAGGAG |
| siRNA 1019 | 1019 | UCCUCGUGUGAGAACCCCU | 2159 | AGGGGUUCUCACACGAGGA |
| siRNA 1020 | 1020 | CCUCGUGUGAGAACCCCUU | 2160 | AAGGGGUUCUCACACGAGG |
| siRNA 1021 | 1021 | CUCGUGUGAGAACCCCUUU | 2161 | AAAGGGGUUCUCACACGAG |
| siRNA 1022 | 1022 | UCGUGUGAGAACCCCUUUG | 2162 | CAAAGGGGUUCUCACACGA |
| siRNA 1023 | 1023 | CGUGUGAGAACCCCUUUGC | 2163 | GCAAAGGGGUUCUCACACG |
| siRNA 1024 | 1024 | GUGUGAGAACCCCUUUGCC | 2164 | GGCAAAGGGGUUCUCACAC |
| siRNA 1025 | 1025 | UGUGAGAACCCCUUUGCCA | 2165 | UGGCAAAGGGGUUCUCACA |
| siRNA 1026 | 1026 | GUGAGAACCCCUUUGCCAG | 2166 | CUGGCAAAGGGGUUCUCAC |
| siRNA 1027 | 1027 | UGAGAACCCCUUUGCCAGA | 2167 | UCUGGCAAAGGGGUUCUCA |
| SiRNA 1028 | 1028 | GAGAACCCCUUUGCCAGAG | 2168 | CUCUGGCAAAGGGGUUCUC |
| siRNA 1029 | 1029 | AGAACCCCUUUGCCAGAGU | 2169 | ACUCUGGCAAAGGGGUUCU |
| siRNA 1030 | 1030 | GAACCCCUUUGCCAGAGUG | 2170 | CACUCUGGCAAAGGGGUUC |
| siRNA 1031 | 1031 | AACCCCUUUGCCAGAGUGA | 2171 | UCACUCUGGCAAAGGGGUU |
| siRNA 1032 | 1032 | ACCCCUUUGCCAGAGUGAG | 2172 | CUCACUCUGGCAAAGGGGU |
| siRNA 1033 | 1033 | CCCCUUUGCCAGAGUGAGA | 2173 | UCUCACUCUGGCAAAGGGG |
| siRNA 1034 | 1034 | CCCUUUGCCAGAGUGAGAC | 2174 | GUCUCACUCUGGCAAAGGG |
| siRNA 1035 | 1035 | CCUUUGCCAGAGUGAGACG | 2175 | CGUCUCACUCUGGCAAAGG |
| siRNA 1036 | 1036 | CUUUGCCAGAGUGAGACGU | 2176 | ACGUCUCACUCUGGCAAAG |
| siRNA 1037 | 1037 | UUUGCCAGAGUGAGACGUG | 2177 | CACGUCUCACUCUGGCAAA |
| siRNA 1038 | 1038 | UUGCCAGAGUGAGACGUGU | 2178 | ACACGUCUCACUCUGGCAA |
| siRNA 1039 | 1039 | UGCCAGAGUGAGACGUGUG | 2179 | CACACGUCUCACUCUGGCA |
| siRNA 1040 | 1040 | GCCAGAGUGAGACGUGUGC | 2180 | GCACACGUCUCACUCUGGC |
| siRNA 1041 | 1041 | CCAGAGUGAGACGUGUGCA | 2181 | UGCACACGUCUCACUCUGG |
| siRNA 1042 | 1042 | CAGAGUGAGACGUGUGCAG | 2182 | CUGCACACGUCUCACUCUG |
| siRNA 1043 | 1043 | AGAGUGAGACGUGUGCAGA | 2183 | UCUGCACACGUCUCACUCU |
| siRNA 1044 | 1044 | GAGUGAGACGUGUGCAGAA | 2184 | UUCUGCACACGUCUCACUC |
| siRNA 1045 | 1045 | AGUGAGACGUGUGCAGAAU | 2185 | AUUCUGCACACGUCUCACU |
| siRNA 1046 | 1046 | GUGAGACGUGUGCAGAAUG | 2186 | CAUUCUGCACACGUCUCAC |
| siRNA 1047 | 1047 | UGAGACGUGUGCAGAAUGA | 2187 | UCAUUCUGCACACGUCUCA |
| siRNA 1048 | 1048 | GAGACGUGUGCAGAAUGAA | 2188 | UUCAUUCUGCACACGUCUC |
| siRNA 1049 | 1049 | AGACGUGUGCAGAAUGAAC | 2189 | GUUCAUUCUGCACACGUCU |
| siRNA 1050 | 1050 | GACGUGUGCAGAAUGAACU | 2190 | AGUUCAUUCUGCACACGUC |
| siRNA 1051 | 1051 | ACGUGUGCAGAAUGAACUA | 2191 | UAGUUCAUUCUGCACACGU |
| siRNA 1052 | 1052 | CGUGUGCAGAAUGAACUAA | 2192 | UUAGUUCAUUCUGCACACG |
| siRNA 1053 | 1053 | GUGUGCAGAAUGAACUAAG | 2193 | CUUAGUUCAUUCUGCACAC |
| siRNA 1054 | 1054 | UGUGCAGAAUGAACUAAGC | 2194 | GCUUAGUUCAUUCUGCACA |
| siRNA 1055 | 1055 | GUGCAGAAUGAACUAAGCC | 2195 | GGCUUAGUUCAUUCUGCAC |
| siRNA 1056 | 1056 | UGCAGAAUGAACUAAGCCC | 2196 | GGGCUUAGUUCAUUCUGCA |
| siRNA 1057 | 1057 | GCAGAAUGAACUAAGCCCC | 2197 | GGGGCUUAGUUCAUUCUGC |
| siRNA 1058 | 1058 | CAGAAUGAACUAAGCCCCA | 2198 | UGGGGCUUAGUUCAUUCUG |
| siRNA 1059 | 1059 | AGAAUGAACUAAGCCCCAG | 2199 | CUGGGGCUUAGUUCAUUCU |
| siRNA 1060 | 1060 | GAAUGAACUAAGCCCCAGA | 2200 | UCUGGGGCUUAGUUCAUUC |
| siRNA 1061 | 1061 | AAUGAACUAAGCCCCAGAG | 2201 | CUCUGGGGCUUAGUUCAUU |
| siRNA 1062 | 1062 | AUGAACUAAGCCCCAGAGG | 2202 | CCUCUGGGGCUUAGUUCAU |
| siRNA 1063 | 1063 | UGAACUAAGCCCCAGAGGG | 2203 | CCCUCUGGGGCUUAGUUCA |
| siRNA 1064 | 1064 | GAACUAAGCCCCAGAGGGU | 2204 | ACCCUCUGGGGCUUAGUUC |
| siRNA 1065 | 1065 | AACUAAGCCCCAGAGGGUU | 2205 | AACCCUCUGGGGCUUAGUU |
| siRNA 1066 | 1066 | ACUAAGCCCCAGAGGGUUU | 2206 | AAACCCUCUGGGGCUUAGU |
| siRNA 1067 | 1067 | CUAAGCCCCAGAGGGUUUU | 2207 | AAAACCCUCUGGGGCUUAG |
| siRNA 1068 | 1068 | UAAGCCCCAGAGGGUUUUA | 2208 | UAAAACCCUCUGGGGCUUA |
| siRNA 1069 | 1069 | AAGCCCCAGAGGGUUUUAA | 2209 | UUAAAACCCUCUGGGGCUU |
| siRNA 1070 | 1070 | AGCCCCAGAGGGUUUUAAU | 2210 | AUUAAAACCCUCUGGGGCU |
| siRNA 1071 | 1071 | GCCCCAGAGGGUUUUAAUG | 2211 | CAUUAAAACCCUCUGGGGC |
| siRNA 1072 | 1072 | CCCCAGAGGGUUUUAAUGG | 2212 | CCAUUAAAACCCUCUGGGG |
| siRNA 1073 | 1073 | CCCAGAGGGUUUUAAUGGC | 2213 | GCCAUUAAAACCCUCUGGG |
| siRNA 1074 | 1074 | CCAGAGGGUUUUAAUGGCU | 2214 | AGCCAUUAAAACCCUCUGG |
| siRNA 1075 | 1075 | CAGAGGGUUUUAAUGGCUU | 2215 | AAGCCAUUAAAACCCUCUG |
| siRNA 1076 | 1076 | AGAGGGUUUUAAUGGCUUG | 2216 | CAAGCCAUUAAAACCCUCU |
| siRNA 1077 | 1077 | GAGGGUUUUAAUGGCUUGC | 2217 | GCAAGCCAUUAAAACCCUC |
| siRNA 1078 | 1078 | AGGGUUUUAAUGGCUUGCC | 2218 | GGCAAGCCAUUAAAACCCU |
| siRNA 1079 | 1079 | GGGUUUUAAUGGCUUGCCU | 2219 | AGGCAAGCCAUUAAAACCC |
| siRNA 1080 | 1080 | GGUUUUAAUGGCUUGCCUG | 2220 | CAGGCAAGCCAUUAAAACC |
| siRNA 1081 | 1081 | GUUUUAAUGGCUUGCCUGC | 2221 | GCAGGCAAGCCAUUAAAAC |
| siRNA 1082 | 1082 | UUUUAAUGGCUUGCCUGCU | 2222 | AGCAGGCAAGCCAUUAAAA |
| siRNA 1083 | 1083 | UUUAAUGGCUUGCCUGCUG | 2223 | CAGCAGGCAAGCCAUUAAA |
| siRNA 1084 | 1084 | UUAAUGGCUUGCCUGCUGU | 2224 | ACAGCAGGCAAGCCAUUAA |
| siRNA 1085 | 1085 | UAAUGGCUUGCCUGCUGUU | 2225 | AACAGCAGGCAAGCCAUUA |
| siRNA 1086 | 1086 | AAUGGCUUGCCUGCUGUUU | 2226 | AAACAGCAGGCAAGCCAUU |
| siRNA 1087 | 1087 | AUGGCUUGCCUGCUGUUUC | 2227 | GAAACAGCAGGCAAGCCAU |
| siRNA 1088 | 1088 | UGGCUUGCCUGCUGUUUCC | 2228 | GGAAACAGCAGGCAAGCCA |
| siRNA 1089 | 1089 | GGCUUGCCUGCUGUUUCCC | 2229 | GGGAAACAGCAGGCAAGCC |
| siRNA 1090 | 1090 | GCUUGCCUGCUGUUUCCCA | 2230 | UGGGAAACAGCAGGCAAGC |
| siRNA 1091 | 1091 | CUUGCCUGCUGUUUCCCAC | 2231 | GUGGGAAACAGCAGGCAAG |
| siRNA 1092 | 1092 | UUGCCUGCUGUUUCCCACA | 2232 | UGUGGGAAACAGCAGGCAA |
| siRNA 1093 | 1093 | UGCCUGCUGUUUCCCACAU | 2233 | AUGUGGGAAACAGCAGGCA |
| siRNA 1094 | 1094 | GCCUGCUGUUUCCCACAUA | 2234 | UAUGUGGGAAACAGCAGGC |
| siRNA 1095 | 1095 | CCUGCUGUUUCCCACAUAA | 2235 | UUAUGUGGGAAACAGCAGG |
| siRNA 1096 | 1096 | CUGCUGUUUCCCACAUAAA | 2236 | UUUAUGUGGGAAACAGCAG |
| siRNA 1097 | 1097 | UGCUGUUUCCCACAUAAAC | 2237 | GUUUAUGUGGGAAACAGCA |
| siRNA 1098 | 1098 | GCUGUUUCCCACAUAAACU | 2238 | AGUUUAUGUGGGAAACAGC |
| siRNA 1099 | 1099 | CUGUUUCCCACAUAAACUA | 2239 | UAGUUUAUGUGGGAAACAG |
| siRNA 1100 | 1100 | UGUUUCCCACAUAAACUAC | 2240 | GUAGUUUAUGUGGGAAACA |
| siRNA 1101 | 1101 | GUUUCCCACAUAAACUACC | 2241 | GGUAGUUUAUGUGGGAAAC |
| siRNA 1102 | 1102 | UUUCCCACAUAAACUACCU | 2242 | AGGUAGUUUAUGUGGGAAA |
| siRNA 1103 | 1103 | UUCCCACAUAAACUACCUC | 2243 | GAGGUAGUUUAUGUGGGAA |
| siRNA 1104 | 1104 | UCCCACAUAAACUACCUCA | 2244 | UGAGGUAGUUUAUGUGGGA |
| siRNA 1105 | 1105 | CCCACAUAAACUACCUCAG | 2245 | CUGAGGUAGUUUAUGUGGG |
| siRNA 1106 | 1106 | CCACAUAAACUACCUCAGG | 2246 | CCUGAGGUAGUUUAUGUGG |
| siRNA 1107 | 1107 | CACAUAAACUACCUCAGGA | 2247 | UCCUGAGGUAGUUUAUGUG |
| siRNA 1108 | 1108 | ACAUAAACUACCUCAGGAG | 2248 | CUCCUGAGGUAGUUUAUGU |
| siRNA 1109 | 1109 | CAUAAACUACCUCAGGAGU | 2249 | ACUCCUGAGGUAGUUUAUG |
| siRNA 1110 | 1110 | AUAAACUACCUCAGGAGUC | 2250 | GACUCCUGAGGUAGUUUAU |
| siRNA 1111 | 1111 | UAAACUACCUCAGGAGUCA | 2251 | UGACUCCUGAGGUAGUUUA |
| siRNA 1112 | 1112 | AAACUACCUCAGGAGUCAC | 2252 | GUGACUCCUGAGGUAGUUU |
| siRNA 1113 | 1113 | AACUACCUCAGGAGUCACU | 2253 | AGUGACUCCUGAGGUAGUU |
| siRNA 1114 | 1114 | ACUACCUCAGGAGUCACUG | 2254 | CAGUGACUCCUGAGGUAGU |
| siRNA 1115 | 1115 | CUACCUCAGGAGUCACUGU | 2255 | ACAGUGACUCCUGAGGUAG |
| siRNA 1116 | 1116 | UACCUCAGGAGUCACUGUA | 2256 | UACAGUGACUCCUGAGGUA |
| siRNA 1117 | 1117 | ACCUCAGGAGUCACUGUAA | 2257 | UUACAGUGACUCCUGAGGU |
| siRNA 1118 | 1118 | CCUCAGGAGUCACUGUAAA | 2258 | UUUACAGUGACUCCUGAGG |
| siRNA 1119 | 1119 | CUCAGGAGUCACUGUAAAA | 2259 | UUUUACAGUGACUCCUGAG |
| siRNA 1120 | 1120 | UCAGGAGUCACUGUAAAAU | 2260 | AUUUUACAGUGACUCCUGA |
| siRNA 1121 | 1121 | CAGGAGUCACUGUAAAAUA | 2261 | UAUUUUACAGUGACUCCUG |
| siRNA 1122 | 1122 | AGGAGUCACUGUAAAAUAA | 2262 | UUAUUUUACAGUGACUCCU |
| siRNA 1123 | 1123 | GGAGUCACUGUAAAAUAAA | 2263 | UUUAUUUUACAGUGACUCC |
| siRNA 1124 | 1124 | GAGUCACUGUAAAAUAAAC | 2264 | GUUUAUUUUACAGUGACUC |
| siRNA 1125 | 1125 | AGUCACUGUAAAAUAAACU | 2265 | AGUUUAUUUUACAGUGACU |
| siRNA 1126 | 1126 | GUCACUGUAAAAUAAACUG | 2266 | CAGUUUAUUUUACAGUGAC |
| siRNA 1127 | 1127 | UCACUGUAAAAUAAACUGG | 2267 | CCAGUUUAUUUUACAGUGA |
| siRNA 1128 | 1128 | CACUGUAAAAUAAACUGGC | 2268 | GCCAGUUUAUUUUACAGUG |
| siRNA 1129 | 1129 | ACUGUAAAAUAAACUGGCC | 2269 | GGCCAGUUUAUUUUACAGU |
| siRNA 1130 | 1130 | CUGUAAAAUAAACUGGCCU | 2270 | AGGCCAGUUUAUUUUACAG |
| siRNA 1131 | 1131 | UGUAAAAUAAACUGGCCUU | 2271 | AAGGCCAGUUUAUUUUACA |
| siRNA 1132 | 1132 | GUAAAAUAAACUGGCCUUG | 2272 | CAAGGCCAGUUUAUUUUAC |
| siRNA 1133 | 1133 | UAAAAUAAACUGGCCUUGU | 2273 | ACAAGGCCAGUUUAUUUUA |
| siRNA 1134 | 1134 | AAAAUAAACUGGCCUUGUU | 2274 | AACAAGGCCAGUUUAUUUU |
| siRNA 1135 | 1135 | AAAUAAACUGGCCUUGUUG | 2275 | CAACAAGGCCAGUUUAUUU |
| siRNA 1136 | 1136 | AAUAAACUGGCCUUGUUGU | 2276 | ACAACAAGGCCAGUUUAUU |
| siRNA 1137 | 1137 | AUAAACUGGCCUUGUUGUC | 2277 | GACAACAAGGCCAGUUUAU |
| siRNA 1138 | 1138 | UAAACUGGCCUUGUUGUCU | 2278 | AGACAACAAGGCCAGUUUA |
| siRNA 1139 | 1139 | AAACUGGCCUUGUUGUCUU | 2279 | AAGACAACAAGGCCAGUUU |
| siRNA 1140 | 1140 | AACUGGCCUUGUUGUCUUA | 2280 | UAAGACAACAAGGCCAGUU |

TABLE 21
Additional Sequences

| SEQ ID | |
|---|---|
| NO: | 5′ to 3′ Sequence |
| 2443 | GGGGTGGGGAGGGAGCGAGAGGAATCCGACCCTGTCTCAGCCCACAGCCTCCGAGGTCTCCAAGTAAAGGGAAGGA |
| | TCTTTAGCTGCATTAGACTTCAAAGCGTTTAGACCAGTTTCTCCATCTTACGGAGCGGTGAACGGGCTCAGGAATGTG |
| | GAGCGTTTCCTGGCGTCAAGCAGGTCAAAGTCAGCGCTGCTTTTTTTACAGACACTGCTTTTCTTACAGTCTTCGACTA |
| | TAAACTCTACAAGAATAGGAATCTTCGTATTTTTTTCCTCTGCTGAATTCCTAGTGCCCAGATTAGTGCTTGGCACATG |
| | ATTATAAGCGCCATGGCTATGGCTAGTGTTAAATTGCTTGCCGGTGTTTTAAGAAAGCCAGATGCCTGGATTGGACTC |
| | TGGGGTGTTCTCCGAGGGACACCTTCATCATACAAACTCTGTACTTCCTGGAATCGATACTTGTATTTTTCTAGTACCA |
| | AGTTACGTGCACCAAATTATAAAACACTTTTTTATAATATTTTCTCACTGAGACTCCCAGGGCTTTTACTATCTCCAGA |
| | ATGTATTTTTCCTTTTTCCGTAAGACTCAAAAGTAATATAAGGTCTACAAAATCTACTAAAAAGTCTCTGCAAAAAGT |
| | AGATGAAGAGGACTCTGATGAAGAAAGCCATCATGATGAGATGAGTGAGCAGGAAGAGGAGCTTGAGGATGATCCT |
| | ACTGTAGTCAAAAACTATAAAGACCTGGAAAAAGCAGTTCAGTCTTTTCGGTATGATGTTGTCCTGAAGACGGGGCT |
| | AGATATTGGGAGAAACAAAGTGGAAGATGCTTTCTACAAAGGTGAACTCAGGCTGAATGAGGAAAAATTATGGAAG |
| | AAAAGCAGAACGGTGAAAGTGGGAGATACATTGGATCTTCTCATTGGAGAGGATAAAGAAGCAGGAACAGAGACAG |
| | TTATGCGGATTCTCTTGAAAAAAGTGTTTGAAGAGAAGACTGAAAGTGAAAAATACAGAGTGGTGTTACGGCGGTGG |
| | AAAAGTTTAAAGTTGCCTAAGAAGAGAATGTCTAAATAAATGGATTGCTTTTTAGCAATAGAGCTGCTTTCTAGTGGT |
| | AAAGGAAGGGGTCACCTGAAAAATAGGACATTTTTATTAAAATAAAGTTCTCTTAGCGTT |
| 2462 | GGGGTGGGGAGGGAGCGAGAGGAATCCGACCCTGTCTCAGCCCACAGCCTCCGAGGTCTCCAAGTAAAGGGAAGGA |
| | TCTTTAGCTGCATTAGACTTCAAAGCGTTTAGACCAGTTTCTCCATCTTACGGAGCGGTGAACGGGCTCAGGAATGTG |
| | GAGCGTTTCCTGGCGTCAAGCAGGTCAAAGTCAGCGCTGCTTTTTTTACAGACACTGCTTTTCTTACAGTCTTCGACTA |
| | TAAACTCTACAAGAATAGGAATCTTCGTATTTTTTTCCTCTGCTGAATTCCTAGTGCCCAGATTAGTGCTTGGCACATG |
| | ATTATAAGCGCCATGGCTATGGCTAGTGTTAAATTGCTTGCCGGTGTTTTAAGAAAGCCAGATGCCTGGATTGGACTC |
| | TGGGGTGTTCTCCGAGGGACACCTTCATCATACAAACTCTGTACTTCCTGGAATCGATACTTGTATTTTTCTAGTACCA |
| | AGTTACGTGCACCAAATTATAAAACACTTTTTTATAATATTTTCTCACTGAGACTCCCAGGGCTTTTACTATCTCCAGA |
| | ATGTATTTTTCCTTTTTCCGTAAGACTCAAAAGTAATATAAGGTCTACAAAATCTACTAAAAAGTCTCTGCAAAAAGT |
| | AGATGAAGAGGACTCTGATGAAGAAAGCCATCATGATGAGATGAGTGAGCAGGAAGAGGAGCTTGAGGATGATCCT |
| | ACTGTAGTCAAAAACTATAAAGACCTGGAAAAAGCAGTTCAGTCTTTTCGGTATGATGTTGTCCTGAAGACGGGGCT |
| | AGATATTGGGAGAAACAAAGTGGAAGATGCTTTCTACAAAGGTGAACTCAGGCTGAATGAGGAAAAATTATGGAAG |
| | AAAAGCAGAACGGTGAAAGTGGGAGATACATTGGATCTTCTCATTGGAGAGGATAAAGAAGCAGGAACAGAGACAG |
| | TTATGCGGATTCTCTTGAAAAAAGTGTTTGAAGAGAAGACTGAAAGTGAAAAATACAGAGTGGTGTTACGGCGGTGG |
| | AAAAGTTTAAAGTTGCCTAAGAAGAGAATGTCTAAATAAATGGATTGCTTTTTAGCAATAGAGCTGCTTTCTAGTGGT |
| | AAAGGAAGGGGTCACCTGAAAAATAGGACATTTTTATTAAAATAAAGTTCTCTTAGCGTT |

What is claimed is:

1. A composition comprising an oligonucleotide that targets MTRES1 and when administered to a subject in an effective amount decreases central nervous system (CNS) MTRES1.

2. The composition of claim 1, wherein the CNS MTRES1 decreased by about 10% or more, as compared to prior to administration.

3. A composition comprising an oligonucleotide that targets MTRES1 and when administered to a subject in an effective amount increases cognitive function or slows cognitive decline.

4. The composition of claim 3, wherein the cognitive function is increased by about 10% or more, as compared to prior to administration.

5. The composition of claim 3, wherein the cognitive decline is slowed by about 10% or more, as compared to prior to administration.

6. A composition comprising an oligonucleotide that targets MTRES1 and when administered to a subject in an effective amount decreases a marker of neurodegeneration.

7. The composition of claim 6, wherein the marker of neurodegeneration comprises a central nervous system (CNS) or cerebrospinal fluid (CSF) marker of neurodegeneration.

8. The composition of claim 6, wherein the marker of neurodegeneration comprises a measurement of central nervous system (CNS) amyloid plaques, CNS tau accumulation, cerebrospinal fluid (CSF) beta-amyloid 42, CSF tau, CSF phospho-tau, CSF or plasma neurofilament light chain (NfL), Lewy bodies, or CSF alpha-synuclein.

9. The composition of any one of claims 6-8, wherein the marker of neurodegeneration is decreased by about 10% or more, as compared to prior to administration.

10. The composition of any one of claims 1, 3, or 6, wherein the oligonucleotide comprises a modified internucleoside linkage.

11. The composition of claim 10, wherein the modified internucleoside linkage comprises alkylphosphonate, phosphorothioate, methylphosphonate, phosphorodithioate, alkylphosphonothioate, phosphoramidate, carbamate, carbonate, phosphate triester, acetamidate, or carboxymethyl ester, or a combination thereof.

12. The composition of claim 10, wherein the modified internucleoside linkage comprises one or more phosphorothioate linkages.

13. The composition of any one of claims 1, 3, or 6, wherein the oligonucleotide comprises 1, 2, 3, 4, 5, 6, 7, 8, 9, 10, 11, 12, 13, 14, 15, 16, 17, 18, 19, or 20 modified internucleoside linkages.

14. The composition of any one of claims 1, 3, or 6, wherein the oligonucleotide comprises a modified nucleoside.

15. The composition of claim 14, wherein the modified nucleoside comprises a locked nucleic acid (LNA), hexitol nucleic acid (HLA), cyclohexene nucleic acid (CeNA), 2′-methoxyethyl, 2′-O-alkyl, 2′-O-allyl, 2′-O-allyl, 2′-fluoro, or 2′-deoxy, or a combination thereof.

16. The composition of claim 14, wherein the modified nucleoside comprises a LNA.

17. The composition of claim 14, wherein the modified nucleoside comprises a 2′,4′ constrained ethyl nucleic acid.

18. The composition of claim 14, wherein the modified nucleoside comprises a 2′-O-methyl nucleoside, 2′-deoxyfluoro nucleoside, 2′-O—N-methylacetamido (2′-O-NMA) nucleoside, a 2′-O-dimethylaminoethoxyethyl (2′-O-DMAEOE) nucleoside, 2′-O-aminopropyl (2′-O-AP)nucleoside, or 2′-ara-F, or a combination thereof.

19. The composition of claim 14, wherein the modified nucleoside comprises one or more 2′fluoro modified nucleosides.

20. The composition of claim 14, wherein the modified nucleoside comprises a 2′ O-alkyl modified nucleoside.

21. The composition of any one of claims 1, 3, or 6, wherein the oligonucleotide comprises 1, 2, 3, 4, 5, 6, 7, 8, 9, 10, 11, 12, 13, 14, 15, 16, 17, 18, 19, 20, or 21 modified nucleosides.

22. The composition of claim any one of claims 1, 3, or 6, wherein the oligonucleotide comprises a lipophilic moiety attached at a 3′ or 5′ terminus of the oligonucleotide.

23. The composition of claim 22, wherein the lipophilic moiety comprises cholesterol, retinoic acid, cholic acid, adamantane acetic acid, 1-pyrene butyric acid, dihydrotestosterone, 1,3-bis-O(hexadecyl)glycerol, geranyloxyhexyanol, hexadecylglycerol, borneol, menthol, 1,3-propanediol, heptadecyl, palmitic acid, myristic acid, 03-(oleoyl)lithocholic acid, 03-(oleoyl)cholenic acid, ibuprofen, naproxen, dimethoxytrityl, or phenoxazine.

24. The composition of claim 22, wherein the lipophilic moiety comprises a C4-C30 hydrocarbon chain.

25. The composition of claim 22, wherein the lipophilic moiety comprises a lipid.

26. The composition of claim 25, wherein the lipid comprises myristoyl, palmitoyl, stearoyl, lithocholoyl, docosanoyl, docosahexaenoyl, myristyl, palmityl stearyl, or α-tocopherol, or a combination thereof.

27. The composition of claim any one of claims 1, 3, or 6, wherein the oligonucleotide comprises a small interfering RNA (siRNA) comprising a sense strand and an antisense strand.

28. The composition of claim 27, wherein the sense strand is 12-30 nucleosides in length.

29. The composition of claim 27, wherein the antisense strand is 12-30 nucleosides in length.

30. A composition comprising an oligonucleotide that inhibits the expression of MTRES1, wherein the oligonucleotide comprises an siRNA comprising a sense strand and an antisense strand, each strand is independently about 12-30 nucleosides in length, and at least one of the sense strand and the antisense strand comprises a nucleoside sequence comprising about 12-30 contiguous nucleosides of SEQ ID NO: 2443.

31. The composition of claim 27, wherein any one of the following is true with regard to the sense strand:
all purines comprise 2′ fluoro modified purines, and all pyrimidines comprise a mixture of 2′ fluoro and 2′ methyl modified pyrimidines;
all purines comprise 2′ methyl modified purines, and all pyrimidines comprise a mixture of 2′ fluoro and 2′ methyl modified pyrimidines;
all purines comprise 2′ fluoro modified purines, and all pyrimidines comprise 2′ methyl modified pyrimidines;
all pyrimidines comprise 2′ fluoro modified pyrimidines, and all purines comprise a mixture of 2′ fluoro and 2′ methyl modified purines;
all pyrimidines comprise 2′ methyl modified pyrimidines, and all purines comprise a mixture of 2′ fluoro and 2′ methyl modified purines; or
all pyrimidines comprise 2′ fluoro modified pyrimidines, and all purines comprise 2′ methyl modified purines.

32. The composition of claim 27, wherein any one of the following is true with regard to the antisense strand:
all purines comprise 2′ fluoro modified purines, and all pyrimidines comprise a mixture of 2′ fluoro and 2′ methyl modified pyrimidines;
all purines comprise 2′ methyl modified purines, and all pyrimidines comprise a mixture of 2′ fluoro and 2′ methyl modified pyrimidines;
all purines comprise 2′ methyl modified purines, and all pyrimidines comprise 2′ fluoro modified pyrimidines;
all pyrimidines comprise 2′ fluoro modified pyrimidines, and all purines comprise a mixture of 2′ fluoro and 2′ methyl modified purines;
all pyrimidines comprise 2′ methyl modified pyrimidines, and all purines comprise a mixture of 2′ fluoro and 2′ methyl modified purines; or
all pyrimidines comprise 2′ methyl modified pyrimidines, and all purines comprise 2′ fluoro modified purines.

33. The composition of claim 27, wherein the oligonucleotide comprises a phosphate at the 5′ end of the antisense strand.

34. The composition of claim 27, wherein the oligonucleotide comprises a phosphate mimic at the 5′ end of the antisense strand.

35. The composition of claim 34, wherein the phosphate mimic comprises a 5′-vinyl phosphonate (VP).

36. The composition of any one of claims 1, 3, or 6, wherein the oligonucleotide comprises an antisense oligonucleotide (ASO).

37. The composition of claim 36, wherein the ASO is 12-30 nucleosides in length.

38. A composition comprising an oligonucleotide that inhibits the expression of MTRES1, wherein the oligonucleotide comprises an ASO about 12-30 nucleosides in length and a nucleoside sequence complementary to about 12-30 contiguous nucleosides of SEQ ID NO: 2443.

39. The composition of any one of claims 1, 3, 6, or 38, further comprising a pharmaceutically acceptable carrier.

40. A method of treating a subject having a neurological disorder, comprising administering an effective amount of the composition of claim 39 to the subject.

41. The method of claim 40, wherein the neurological disorder comprises dementia, Alzheimer's disease, delirium, cognitive decline, vascular dementia, or Parkinson's disease.

The application's sequence listing, which the Patent Office published only in electronic form, follows.

SEQUENCE LISTING (2673 sequences)

SEQ ID NO: 1 - RNA, 19 nt, Artificial Sequence
  Description of Artificial Sequence: Synthetic oligonucleotide
gcgcagauagggguagccu

SEQ ID NO: 2 - RNA, 19 nt, Artificial Sequence
  Description of Artificial Sequence: Synthetic oligonucleotide
cgcagauagggguagccug

SEQ ID NO: 3 - RNA, 19 nt, Artificial Sequence
  Description of Artificial Sequence: Synthetic oligonucleotide
gcagauagggguagccugg

SEQ ID NO: 4 - RNA, 19 nt, Artificial Sequence
  Description of Artificial Sequence: Synthetic oligonucleotide
cagauagggguagccugga

SEQ ID NO: 5 - RNA, 19 nt, Artificial Sequence
  Description of Artificial Sequence: Synthetic oligonucleotide
agauagggguagccuggag

SEQ ID NO: 6 - RNA, 19 nt, Artificial Sequence
  Description of Artificial Sequence: Synthetic oligonucleotide
gauagggguagccuggagg

SEQ ID NO: 7 - RNA, 19 nt, Artificial Sequence
  Description of Artificial Sequence: Synthetic oligonucleotide
auagggguagccuggaggc

SEQ ID NO: 8 - RNA, 19 nt, Artificial Sequence
  Description of Artificial Sequence: Synthetic oligonucleotide
uagggguagccuggaggcc

SEQ ID NO: 9 - RNA, 19 nt, Artificial Sequence
  Description of Artificial Sequence: Synthetic oligonucleotide
agggguagccuggaggccu

SEQ ID NO: 10 - RNA, 19 nt, Artificial Sequence
  Description of Artificial Sequence: Synthetic oligonucleotide
gggguagccuggaggccug

SEQ ID NO: 11 - RNA, 19 nt, Artificial Sequence
  Description of Artificial Sequence: Synthetic oligonucleotide
ggguagccuggaggccugc

SEQ ID NO: 12 - RNA, 19 nt, Artificial Sequence
  Description of Artificial Sequence: Synthetic oligonucleotide
gguagccuggaggccugca

SEQ ID NO: 13 - RNA, 19 nt, Artificial Sequence
  Description of Artificial Sequence: Synthetic oligonucleotide
guagccuggaggccugcag

SEQ ID NO: 14 - RNA, 19 nt, Artificial Sequence
  Description of Artificial Sequence: Synthetic oligonucleotide
uagccuggaggccugcagu

SEQ ID NO: 15 - RNA, 19 nt, Artificial Sequence
  Description of Artificial Sequence: Synthetic oligonucleotide
agccuggaggccugcaguc

SEQ ID NO: 16 - RNA, 19 nt, Artificial Sequence
  Description of Artificial Sequence: Synthetic oligonucleotide
gccuggaggccugcagucc

SEQ ID NO: 17 - RNA, 19 nt, Artificial Sequence
  Description of Artificial Sequence: Synthetic oligonucleotide
ccuggaggccugcaguccg

SEQ ID NO: 18 - RNA, 19 nt, Artificial Sequence
  Description of Artificial Sequence: Synthetic oligonucleotide
cuggaggccugcaguccgc

SEQ ID NO: 19 - RNA, 19 nt, Artificial Sequence
  Description of Artificial Sequence: Synthetic oligonucleotide
uggaggccugcaguccgcg

SEQ ID NO: 20 - RNA, 19 nt, Artificial Sequence
  Description of Artificial Sequence: Synthetic oligonucleotide
ggaggccugcaguccgcgc

SEQ ID NO: 21 - RNA, 19 nt, Artificial Sequence
  Description of Artificial Sequence: Synthetic oligonucleotide
gaggccugcaguccgcgcg

SEQ ID NO: 22 - RNA, 19 nt, Artificial Sequence
  Description of Artificial Sequence: Synthetic oligonucleotide
aggccugcaguccgcgcgg

SEQ ID NO: 23 - RNA, 19 nt, Artificial Sequence
  Description of Artificial Sequence: Synthetic oligonucleotide
ggccugcaguccgcgcggc

SEQ ID NO: 24 - RNA, 19 nt, Artificial Sequence
  Description of Artificial Sequence: Synthetic oligonucleotide
gccugcaguccgcgcggcc

SEQ ID NO: 25 - RNA, 19 nt, Artificial Sequence
  Description of Artificial Sequence: Synthetic oligonucleotide
ccugcaguccgcgcggccg

SEQ ID NO: 26 - RNA, 19 nt, Artificial Sequence
  Description of Artificial Sequence: Synthetic oligonucleotide
cugcaguccgcgcggccgc

SEQ ID NO: 27 - RNA, 19 nt, Artificial Sequence
  Description of Artificial Sequence: Synthetic oligonucleotide
ugcaguccgcgcggccgcg

SEQ ID NO: 28 - RNA, 19 nt, Artificial Sequence
  Description of Artificial Sequence: Synthetic oligonucleotide
gcaguccgcgcggccgcgg

SEQ ID NO: 29 - RNA, 19 nt, Artificial Sequence
  Description of Artificial Sequence: Synthetic oligonucleotide
caguccgcgcggccgcggg

SEQ ID NO: 30 - RNA, 19 nt, Artificial Sequence
  Description of Artificial Sequence: Synthetic oligonucleotide
aguccgcgcggccgcgggg

SEQ ID NO: 31 - RNA, 19 nt, Artificial Sequence
  Description of Artificial Sequence: Synthetic oligonucleotide
guccgcgcggccgcgggga

SEQ ID NO: 32 - RNA, 19 nt, Artificial Sequence
  Description of Artificial Sequence: Synthetic oligonucleotide
uccgcgcggccgcggggag

SEQ ID NO: 33 - RNA, 19 nt, Artificial Sequence
  Description of Artificial Sequence: Synthetic oligonucleotide
ccgcgcggccgcggggagg

SEQ ID NO: 34 - RNA, 19 nt, Artificial Sequence
  Description of Artificial Sequence: Synthetic oligonucleotide
cgcgcggccgcggggaggg

SEQ ID NO: 35 - RNA, 19 nt, Artificial Sequence
  Description of Artificial Sequence: Synthetic oligonucleotide
gcgcggccgcggggaggga

SEQ ID NO: 36 - RNA, 19 nt, Artificial Sequence
  Description of Artificial Sequence: Synthetic oligonucleotide
cgcggccgcggggagggac

SEQ ID NO: 37 - RNA, 19 nt, Artificial Sequence
  Description of Artificial Sequence: Synthetic oligonucleotide
gcggccgcggggagggacg

SEQ ID NO: 38 - RNA, 19 nt, Artificial Sequence
  Description of Artificial Sequence: Synthetic oligonucleotide
cggccgcggggagggacga

SEQ ID NO: 39 - RNA, 19 nt, Artificial Sequence
  Description of Artificial Sequence: Synthetic oligonucleotide
ggccgcggggagggacgag

SEQ ID NO: 40 - RNA, 19 nt, Artificial Sequence
  Description of Artificial Sequence: Synthetic oligonucleotide
gccgcggggagggacgaga

SEQ ID NO: 41 - RNA, 19 nt, Artificial Sequence
  Description of Artificial Sequence: Synthetic oligonucleotide
ccgcggggagggacgagag

SEQ ID NO: 42 - RNA, 19 nt, Artificial Sequence
  Description of Artificial Sequence: Synthetic oligonucleotide
cgcggggagggacgagagg

SEQ ID NO: 43 - RNA, 19 nt, Artificial Sequence
  Description of Artificial Sequence: Synthetic oligonucleotide
gcggggagggacgagaggg

SEQ ID NO: 44 - RNA, 19 nt, Artificial Sequence
  Description of Artificial Sequence: Synthetic oligonucleotide
cggggagggacgagagggc

SEQ ID NO: 45 - RNA, 19 nt, Artificial Sequence
  Description of Artificial Sequence: Synthetic oligonucleotide
ggggagggacgagagggcc

SEQ ID NO: 46 - RNA, 19 nt, Artificial Sequence
  Description of Artificial Sequence: Synthetic oligonucleotide
gggagggacgagagggccu

SEQ ID NO: 47 - RNA, 19 nt, Artificial Sequence
  Description of Artificial Sequence: Synthetic oligonucleotide
ggagggacgagagggccug

SEQ ID NO: 48 - RNA, 19 nt, Artificial Sequence
  Description of Artificial Sequence: Synthetic oligonucleotide
gagggacgagagggccuga

SEQ ID NO: 49 - RNA, 19 nt, Artificial Sequence
  Description of Artificial Sequence: Synthetic oligonucleotide
agggacgagagggccugac

SEQ ID NO: 50 - RNA, 19 nt, Artificial Sequence
  Description of Artificial Sequence: Synthetic oligonucleotide
gggacgagagggccugacg

SEQ ID NO: 51 - RNA, 19 nt, Artificial Sequence
  Description of Artificial Sequence: Synthetic oligonucleotide
ggacgagagggccugacgu

SEQ ID NO: 52 - RNA, 19 nt, Artificial Sequence
  Description of Artificial Sequence: Synthetic oligonucleotide
gacgagagggccugacgua

SEQ ID NO: 53 - RNA, 19 nt, Artificial Sequence
  Description of Artificial Sequence: Synthetic oligonucleotide
acgagagggccugacguac

SEQ ID NO: 54 - RNA, 19 nt, Artificial Sequence
  Description of Artificial Sequence: Synthetic oligonucleotide
cgagagggccugacguaca

SEQ ID NO: 55 - RNA, 19 nt, Artificial Sequence
  Description of Artificial Sequence: Synthetic oligonucleotide
gagagggccugacguacag

SEQ ID NO: 56 - RNA, 19 nt, Artificial Sequence
  Description of Artificial Sequence: Synthetic oligonucleotide
agagggccugacguacaga

SEQ ID NO: 57 - RNA, 19 nt, Artificial Sequence
  Description of Artificial Sequence: Synthetic oligonucleotide
gagggccugacguacagau

SEQ ID NO: 58 - RNA, 19 nt, Artificial Sequence
  Description of Artificial Sequence: Synthetic oligonucleotide
agggccugacguacagauu

SEQ ID NO: 59 - RNA, 19 nt, Artificial Sequence
  Description of Artificial Sequence: Synthetic oligonucleotide
gggccugacguacagauua

SEQ ID NO: 60 - RNA, 19 nt, Artificial Sequence
  Description of Artificial Sequence: Synthetic oligonucleotide
ggccugacguacagauuau

SEQ ID NO: 61 - RNA, 19 nt, Artificial Sequence
  Description of Artificial Sequence: Synthetic oligonucleotide
gccugacguacagauuaua

SEQ ID NO: 62 - RNA, 19 nt, Artificial Sequence
  Description of Artificial Sequence: Synthetic oligonucleotide
ccugacguacagauuauaa

SEQ ID NO: 63 - RNA, 19 nt, Artificial Sequence
  Description of Artificial Sequence: Synthetic oligonucleotide
cugacguacagauuauaag

SEQ ID NO: 64 - RNA, 19 nt, Artificial Sequence
  Description of Artificial Sequence: Synthetic oligonucleotide
ugacguacagauuauaagc

SEQ ID NO: 65 - RNA, 19 nt, Artificial Sequence
  Description of Artificial Sequence: Synthetic oligonucleotide
gacguacagauuauaagcg

SEQ ID NO: 66 - RNA, 19 nt, Artificial Sequence
  Description of Artificial Sequence: Synthetic oligonucleotide
acguacagauuauaagcgc

SEQ ID NO: 67 - RNA, 19 nt, Artificial Sequence
  Description of Artificial Sequence: Synthetic oligonucleotide
cguacagauuauaagcgcc

SEQ ID NO: 68 - RNA, 19 nt, Artificial Sequence
  Description of Artificial Sequence: Synthetic oligonucleotide
guacagauuauaagcgcca

SEQ ID NO: 69 - RNA, 19 nt, Artificial Sequence
  Description of Artificial Sequence: Synthetic oligonucleotide
uacagauuauaagcgccau

SEQ ID NO: 70 - RNA, 19 nt, Artificial Sequence
  Description of Artificial Sequence: Synthetic oligonucleotide
acagauuauaagcgccaug

SEQ ID NO: 71 - RNA, 19 nt, Artificial Sequence
  Description of Artificial Sequence: Synthetic oligonucleotide
cagauuauaagcgccaugg

SEQ ID NO: 72 - RNA, 19 nt, Artificial Sequence
  Description of Artificial Sequence: Synthetic oligonucleotide
agauuauaagcgccauggc

SEQ ID NO: 73 - RNA, 19 nt, Artificial Sequence
  Description of Artificial Sequence: Synthetic oligonucleotide
gauuauaagcgccauggcu

SEQ ID NO: 74 - RNA, 19 nt, Artificial Sequence
  Description of Artificial Sequence: Synthetic oligonucleotide
auuauaagcgccauggcua

SEQ ID NO: 75 - RNA, 19 nt, Artificial Sequence
  Description of Artificial Sequence: Synthetic oligonucleotide
uuauaagcgccauggcuau

SEQ ID NO: 76 - RNA, 19 nt, Artificial Sequence
  Description of Artificial Sequence: Synthetic oligonucleotide
uauaagcgccauggcuaug

SEQ ID NO: 77 - RNA, 19 nt, Artificial Sequence
  Description of Artificial Sequence: Synthetic oligonucleotide
auaagcgccauggcuaugg

SEQ ID NO: 78 - RNA, 19 nt, Artificial Sequence
  Description of Artificial Sequence: Synthetic oligonucleotide
uaagcgccauggcuauggc

SEQ ID NO: 79 - RNA, 19 nt, Artificial Sequence
  Description of Artificial Sequence: Synthetic oligonucleotide
aagcgccauggcuauggcu

SEQ ID NO: 80 - RNA, 19 nt, Artificial Sequence
  Description of Artificial Sequence: Synthetic oligonucleotide
agcgccauggcuauggcua

SEQ ID NO: 81 - RNA, 19 nt, Artificial Sequence
  Description of Artificial Sequence: Synthetic oligonucleotide
gcgccauggcuauggcuag

SEQ ID NO: 82 - RNA, 19 nt, Artificial Sequence
  Description of Artificial Sequence: Synthetic oligonucleotide
cgccauggcuauggcuagu

SEQ ID NO: 83 - RNA, 19 nt, Artificial Sequence
  Description of Artificial Sequence: Synthetic oligonucleotide
gccauggcuauggcuagug

SEQ ID NO: 84 - RNA, 19 nt, Artificial Sequence
  Description of Artificial Sequence: Synthetic oligonucleotide
ccauggcuauggcuagugu

SEQ ID NO: 85 - RNA, 19 nt, Artificial Sequence
  Description of Artificial Sequence: Synthetic oligonucleotide
cauggcuauggcuaguguu

SEQ ID NO: 86 - RNA, 19 nt, Artificial Sequence
  Description of Artificial Sequence: Synthetic oligonucleotide
auggcuauggcuaguguua

SEQ ID NO: 87 - RNA, 19 nt, Artificial Sequence
  Description of Artificial Sequence: Synthetic oligonucleotide
uggcuauggcuaguguuaa

SEQ ID NO: 88 - RNA, 19 nt, Artificial Sequence
  Description of Artificial Sequence: Synthetic oligonucleotide
ggcuauggcuaguguuaaa

SEQ ID NO: 89 - RNA, 19 nt, Artificial Sequence
  Description of Artificial Sequence: Synthetic oligonucleotide
gcuauggcuaguguuaaau

SEQ ID NO: 90 - RNA, 19 nt, Artificial Sequence
  Description of Artificial Sequence: Synthetic oligonucleotide
cuauggcuaguguuaaauu

SEQ ID NO: 91 - RNA, 19 nt, Artificial Sequence
  Description of Artificial Sequence: Synthetic oligonucleotide
uauggcuaguguuaaauug

SEQ ID NO: 92 - RNA, 19 nt, Artificial Sequence
  Description of Artificial Sequence: Synthetic oligonucleotide
auggcuaguguuaaauugc

SEQ ID NO: 93 - RNA, 19 nt, Artificial Sequence
  Description of Artificial Sequence: Synthetic oligonucleotide
uggcuaguguuaaauugcu

SEQ ID NO: 94 - RNA, 19 nt, Artificial Sequence
  Description of Artificial Sequence: Synthetic oligonucleotide
ggcuaguguuaaauugcuu

SEQ ID NO: 95 - RNA, 19 nt, Artificial Sequence
  Description of Artificial Sequence: Synthetic oligonucleotide
gcuaguguuaaauugcuug

SEQ ID NO: 96 - RNA, 19 nt, Artificial Sequence
  Description of Artificial Sequence: Synthetic oligonucleotide
cuaguguuaaauugcuugc

SEQ ID NO: 97 - RNA, 19 nt, Artificial Sequence
  Description of Artificial Sequence: Synthetic oligonucleotide
uaguguuaaauugcuugcc

SEQ ID NO: 98 - RNA, 19 nt, Artificial Sequence
  Description of Artificial Sequence: Synthetic oligonucleotide
aguguuaaauugcuugccg

SEQ ID NO: 99 - RNA, 19 nt, Artificial Sequence
  Description of Artificial Sequence: Synthetic oligonucleotide
guguuaaauugcuugccgg

SEQ ID NO: 100 - RNA, 19 nt, Artificial Sequence
  Description of Artificial Sequence: Synthetic oligonucleotide
uguuaaauugcuugccggu

SEQ ID NO: 101 - RNA, 19 nt, Artificial Sequence
  Description of Artificial Sequence: Synthetic oligonucleotide
guuaaauugcuugccggug

SEQ ID NO: 102 - RNA, 19 nt, Artificial Sequence
  Description of Artificial Sequence: Synthetic oligonucleotide
uuaaauugcuugccggugu

SEQ ID NO: 103 - RNA, 19 nt, Artificial Sequence
  Description of Artificial Sequence: Synthetic oligonucleotide
uaaauugcuugccgguguu

SEQ ID NO: 104 - RNA, 19 nt, Artificial Sequence
  Description of Artificial Sequence: Synthetic oligonucleotide
aaauugcuugccgguguuu

SEQ ID NO: 105 - RNA, 19 nt, Artificial Sequence
  Description of Artificial Sequence: Synthetic oligonucleotide
aauugcuugccgguguuuu

SEQ ID NO: 106 - RNA, 19 nt, Artificial Sequence
  Description of Artificial Sequence: Synthetic oligonucleotide
auugcuugccgguguuuua

SEQ ID NO: 107 - RNA, 19 nt, Artificial Sequence
  Description of Artificial Sequence: Synthetic oligonucleotide
uugcuugccgguguuuuaa

SEQ ID NO: 108 - RNA, 19 nt, Artificial Sequence
  Description of Artificial Sequence: Synthetic oligonucleotide
ugcuugccgguguuuuaag

SEQ ID NO: 109 - RNA, 19 nt, Artificial Sequence
  Description of Artificial Sequence: Synthetic oligonucleotide
gcuugccgguguuuuaaga

SEQ ID NO: 110 - RNA, 19 nt, Artificial Sequence
  Description of Artificial Sequence: Synthetic oligonucleotide
cuugccgguguuuuaagaa

SEQ ID NO: 111 - RNA, 19 nt, Artificial Sequence
  Description of Artificial Sequence: Synthetic oligonucleotide
uugccgguguuuuaagaaa

SEQ ID NO: 112 - RNA, 19 nt, Artificial Sequence
  Description of Artificial Sequence: Synthetic oligonucleotide
ugccgguguuuuaagaaag

SEQ ID NO: 113 - RNA, 19 nt, Artificial Sequence
  Description of Artificial Sequence: Synthetic oligonucleotide
gccgguguuuuaagaaagc

SEQ ID NO: 114 - RNA, 19 nt, Artificial Sequence
  Description of Artificial Sequence: Synthetic oligonucleotide
ccgguguuuuaagaaagcc

SEQ ID NO: 115 - RNA, 19 nt, Artificial Sequence
  Description of Artificial Sequence: Synthetic oligonucleotide
cgguguuuuaagaaagcca

SEQ ID NO: 116 - RNA, 19 nt, Artificial Sequence
  Description of Artificial Sequence: Synthetic oligonucleotide
gguguuuuaagaaagccag

SEQ ID NO: 117 - RNA, 19 nt, Artificial Sequence
  Description of Artificial Sequence: Synthetic oligonucleotide
guguuuuaagaaagccaga

SEQ ID NO: 118 - RNA, 19 nt, Artificial Sequence
  Description of Artificial Sequence: Synthetic oligonucleotide
uguuuuaagaaagccagau

SEQ ID NO: 119 - RNA, 19 nt, Artificial Sequence
  Description of Artificial Sequence: Synthetic oligonucleotide
guuuuaagaaagccagaug

SEQ ID NO: 120 - RNA, 19 nt, Artificial Sequence
  Description of Artificial Sequence: Synthetic oligonucleotide
uuuuaagaaagccagaugc

SEQ ID NO: 121 - RNA, 19 nt, Artificial Sequence
  Description of Artificial Sequence: Synthetic oligonucleotide
uuuaagaaagccagaugcc

SEQ ID NO: 122 - RNA, 19 nt, Artificial Sequence
  Description of Artificial Sequence: Synthetic oligonucleotide
uuaagaaagccagaugccu

SEQ ID NO: 123 - RNA, 19 nt, Artificial Sequence
  Description of Artificial Sequence: Synthetic oligonucleotide
uaagaaagccagaugccug

SEQ ID NO: 124 - RNA, 19 nt, Artificial Sequence
  Description of Artificial Sequence: Synthetic oligonucleotide
aagaaagccagaugccugg

SEQ ID NO: 125 - RNA, 19 nt, Artificial Sequence
  Description of Artificial Sequence: Synthetic oligonucleotide
agaaagccagaugccugga

SEQ ID NO: 126 - RNA, 19 nt, Artificial Sequence
  Description of Artificial Sequence: Synthetic oligonucleotide
gaaagccagaugccuggau

SEQ ID NO: 127 - RNA, 19 nt, Artificial Sequence
  Description of Artificial Sequence: Synthetic oligonucleotide
aaagccagaugccuggauu

SEQ ID NO: 128 - RNA, 19 nt, Artificial Sequence
  Description of Artificial Sequence: Synthetic oligonucleotide
aagccagaugccuggauug

SEQ ID NO: 129 - RNA, 19 nt, Artificial Sequence
  Description of Artificial Sequence: Synthetic oligonucleotide
agccagaugccuggauugg

SEQ ID NO: 130 - RNA, 19 nt, Artificial Sequence
  Description of Artificial Sequence: Synthetic oligonucleotide
gccagaugccuggauugga

SEQ ID NO: 131 - RNA, 19 nt, Artificial Sequence
  Description of Artificial Sequence: Synthetic oligonucleotide
ccagaugccuggauuggac

SEQ ID NO: 132 - RNA, 19 nt, Artificial Sequence
  Description of Artificial Sequence: Synthetic oligonucleotide
cagaugccuggauuggacu

SEQ ID NO: 133 - RNA, 19 nt, Artificial Sequence
  Description of Artificial Sequence: Synthetic oligonucleotide
agaugccuggauuggacuc

SEQ ID NO: 134 - RNA, 19 nt, Artificial Sequence
  Description of Artificial Sequence: Synthetic oligonucleotide
gaugccuggauuggacucu

SEQ ID NO: 135 - RNA, 19 nt, Artificial Sequence
  Description of Artificial Sequence: Synthetic oligonucleotide
augccuggauuggacucug

SEQ ID NO: 136 - RNA, 19 nt, Artificial Sequence
  Description of Artificial Sequence: Synthetic oligonucleotide
ugccuggauuggacucugg

SEQ ID NO: 137 - RNA, 19 nt, Artificial Sequence
  Description of Artificial Sequence: Synthetic oligonucleotide
gccuggauuggacucuggg

SEQ ID NO: 138 - RNA, 19 nt, Artificial Sequence
  Description of Artificial Sequence: Synthetic oligonucleotide
ccuggauuggacucugggg

SEQ ID NO: 139 - RNA, 19 nt, Artificial Sequence
  Description of Artificial Sequence: Synthetic oligonucleotide
cuggauuggacucuggggu

SEQ ID NO: 140 - RNA, 19 nt, Artificial Sequence
  Description of Artificial Sequence: Synthetic oligonucleotide
uggauuggacucuggggug

SEQ ID NO: 141 - RNA, 19 nt, Artificial Sequence
  Description of Artificial Sequence: Synthetic oligonucleotide
ggauuggacucuggggugu

SEQ ID NO: 142 - RNA, 19 nt, Artificial Sequence
  Description of Artificial Sequence: Synthetic oligonucleotide
gauuggacucugggguguu

SEQ ID NO: 143 - RNA, 19 nt, Artificial Sequence
  Description of Artificial Sequence: Synthetic oligonucleotide
auuggacucugggguguuc

SEQ ID NO: 144 - RNA, 19 nt, Artificial Sequence
  Description of Artificial Sequence: Synthetic oligonucleotide
uuggacucugggguguucu

SEQ ID NO: 145 - RNA, 19 nt, Artificial Sequence
  Description of Artificial Sequence: Synthetic oligonucleotide
uggacucugggguguucuc

SEQ ID NO: 146 - RNA, 19 nt, Artificial Sequence
  Description of Artificial Sequence: Synthetic oligonucleotide
ggacucugggguguucucc

SEQ ID NO: 147 - RNA, 19 nt, Artificial Sequence
  Description of Artificial Sequence: Synthetic oligonucleotide
gacucugggguguucuccg

SEQ ID NO: 148 - RNA, 19 nt, Artificial Sequence
  Description of Artificial Sequence: Synthetic oligonucleotide
acucugggguguucuccga

SEQ ID NO: 149 - RNA, 19 nt, Artificial Sequence
  Description of Artificial Sequence: Synthetic oligonucleotide
cucugggguguucuccgag

SEQ ID NO: 150 - RNA, 19 nt, Artificial Sequence
  Description of Artificial Sequence: Synthetic oligonucleotide
ucugggguguucuccgagg

SEQ ID NO: 151 - RNA, 19 nt, Artificial Sequence
  Description of Artificial Sequence: Synthetic oligonucleotide
cugggguguucuccgaggg

SEQ ID NO: 152 - RNA, 19 nt, Artificial Sequence
  Description of Artificial Sequence: Synthetic oligonucleotide
ugggguguucuccgaggga

SEQ ID NO: 153 - RNA, 19 nt, Artificial Sequence
  Description of Artificial Sequence: Synthetic oligonucleotide
gggguguucuccgagggac

SEQ ID NO: 154 - RNA, 19 nt, Artificial Sequence
  Description of Artificial Sequence: Synthetic oligonucleotide
ggguguucuccgagggaca

SEQ ID NO: 155 - RNA, 19 nt, Artificial Sequence
  Description of Artificial Sequence: Synthetic oligonucleotide
gguguucuccgagggacac

SEQ ID NO: 156 - RNA, 19 nt, Artificial Sequence
  Description of Artificial Sequence: Synthetic oligonucleotide
guguucuccgagggacacc

SEQ ID NO: 157 - RNA, 19 nt, Artificial Sequence
  Description of Artificial Sequence: Synthetic oligonucleotide
uguucuccgagggacaccu

SEQ ID NO: 158 - RNA, 19 nt, Artificial Sequence
  Description of Artificial Sequence: Synthetic oligonucleotide
guucuccgagggacaccuu

SEQ ID NO: 159 - RNA, 19 nt, Artificial Sequence
  Description of Artificial Sequence: Synthetic oligonucleotide
uucuccgagggacaccuuc

SEQ ID NO: 160 - RNA, 19 nt, Artificial Sequence
  Description of Artificial Sequence: Synthetic oligonucleotide
ucuccgagggacaccuuca

SEQ ID NO: 161 - RNA, 19 nt, Artificial Sequence
  Description of Artificial Sequence: Synthetic oligonucleotide
cuccgagggacaccuucau

SEQ ID NO: 162 - RNA, 19 nt, Artificial Sequence
  Description of Artificial Sequence: Synthetic oligonucleotide
uccgagggacaccuucauc

SEQ ID NO: 163 - RNA, 19 nt, Artificial Sequence
  Description of Artificial Sequence: Synthetic oligonucleotide
ccgagggacaccuucauca

SEQ ID NO: 164 - RNA, 19 nt, Artificial Sequence
  Description of Artificial Sequence: Synthetic oligonucleotide
cgagggacaccuucaucau

SEQ ID NO: 165 - RNA, 19 nt, Artificial Sequence
  Description of Artificial Sequence: Synthetic oligonucleotide
gagggacaccuucaucaua

SEQ ID NO: 166 - RNA, 19 nt, Artificial Sequence
  Description of Artificial Sequence: Synthetic oligonucleotide
agggacaccuucaucauac

SEQ ID NO: 167 - RNA, 19 nt, Artificial Sequence
  Description of Artificial Sequence: Synthetic oligonucleotide
gggacaccuucaucauaca

SEQ ID NO: 168 - RNA, 19 nt, Artificial Sequence
  Description of Artificial Sequence: Synthetic oligonucleotide
ggacaccuucaucauacaa

SEQ ID NO: 169 - RNA, 19 nt, Artificial Sequence
  Description of Artificial Sequence: Synthetic oligonucleotide
gacaccuucaucauacaaa

SEQ ID NO: 170 - RNA, 19 nt, Artificial Sequence
  Description of Artificial Sequence: Synthetic oligonucleotide
acaccuucaucauacaaac

SEQ ID NO: 171 - RNA, 19 nt, Artificial Sequence
  Description of Artificial Sequence: Synthetic oligonucleotide
caccuucaucauacaaacu

SEQ ID NO: 172 - RNA, 19 nt, Artificial Sequence
  Description of Artificial Sequence: Synthetic oligonucleotide
accuucaucauacaaacuc

SEQ ID NO: 173 - RNA, 19 nt, Artificial Sequence
  Description of Artificial Sequence: Synthetic oligonucleotide
ccuucaucauacaaacucu

SEQ ID NO: 174 - RNA, 19 nt, Artificial Sequence
  Description of Artificial Sequence: Synthetic oligonucleotide
cuucaucauacaaacucug

SEQ ID NO: 175 - RNA, 19 nt, Artificial Sequence
  Description of Artificial Sequence: Synthetic oligonucleotide
uucaucauacaaacucugu

SEQ ID NO: 176 - RNA, 19 nt, Artificial Sequence
  Description of Artificial Sequence: Synthetic oligonucleotide
ucaucauacaaacucugua

SEQ ID NO: 177 - RNA, 19 nt, Artificial Sequence
  Description of Artificial Sequence: Synthetic oligonucleotide
caucauacaaacucuguac

SEQ ID NO: 178 - RNA, 19 nt, Artificial Sequence
  Description of Artificial Sequence: Synthetic oligonucleotide
aucauacaaacucuguacu

SEQ ID NO: 179 - RNA, 19 nt, Artificial Sequence
  Description of Artificial Sequence: Synthetic oligonucleotide
ucauacaaacucuguacuu

SEQ ID NO: 180 - RNA, 19 nt, Artificial Sequence
  Description of Artificial Sequence: Synthetic oligonucleotide
cauacaaacucuguacuuc

SEQ ID NO: 181 - RNA, 19 nt, Artificial Sequence
  Description of Artificial Sequence: Synthetic oligonucleotide
auacaaacucuguacuucc

SEQ ID NO: 182 - RNA, 19 nt, Artificial Sequence
  Description of Artificial Sequence: Synthetic oligonucleotide
uacaaacucuguacuuccu

SEQ ID NO: 183 - RNA, 19 nt, Artificial Sequence
  Description of Artificial Sequence: Synthetic oligonucleotide
acaaacucuguacuuccug

SEQ ID NO: 184 - RNA, 19 nt, Artificial Sequence
  Description of Artificial Sequence: Synthetic oligonucleotide
caaacucuguacuuccugg

SEQ ID NO: 185 - RNA, 19 nt, Artificial Sequence
  Description of Artificial Sequence: Synthetic oligonucleotide
aaacucuguacuuccugga

SEQ ID NO: 186 - RNA, 19 nt, Artificial Sequence
  Description of Artificial Sequence: Synthetic oligonucleotide
aacucuguacuuccuggaa

SEQ ID NO: 187 - RNA, 19 nt, Artificial Sequence
  Description of Artificial Sequence: Synthetic oligonucleotide
acucuguacuuccuggaau

SEQ ID NO: 188 - RNA, 19 nt, Artificial Sequence
  Description of Artificial Sequence: Synthetic oligonucleotide
cucuguacuuccuggaauc

SEQ ID NO: 189 - RNA, 19 nt, Artificial Sequence
  Description of Artificial Sequence: Synthetic oligonucleotide
ucuguacuuccuggaaucg

SEQ ID NO: 190 - RNA, 19 nt, Artificial Sequence
  Description of Artificial Sequence: Synthetic oligonucleotide
cuguacuuccuggaaucga

SEQ ID NO: 191 - RNA, 19 nt, Artificial Sequence
  Description of Artificial Sequence: Synthetic oligonucleotide
uguacuuccuggaaucgau

SEQ ID NO: 192 - RNA, 19 nt, Artificial Sequence
  Description of Artificial Sequence: Synthetic oligonucleotide
guacuuccuggaaucgaua

SEQ ID NO: 193 - RNA, 19 nt, Artificial Sequence
  Description of Artificial Sequence: Synthetic oligonucleotide
uacuuccuggaaucgauac

SEQ ID NO: 194 - RNA, 19 nt, Artificial Sequence
  Description of Artificial Sequence: Synthetic oligonucleotide
acuuccuggaaucgauacu

SEQ ID NO: 195 - RNA, 19 nt, Artificial Sequence
  Description of Artificial Sequence: Synthetic oligonucleotide
cuuccuggaaucgauacuu

SEQ ID NO: 196 - RNA, 19 nt, Artificial Sequence
  Description of Artificial Sequence: Synthetic oligonucleotide
uuccuggaaucgauacuug

SEQ ID NO: 197 - RNA, 19 nt, Artificial Sequence
  Description of Artificial Sequence: Synthetic oligonucleotide
uccuggaaucgauacuugu

SEQ ID NO: 198 - RNA, 19 nt, Artificial Sequence
  Description of Artificial Sequence: Synthetic oligonucleotide
ccuggaaucgauacuugua

SEQ ID NO: 199 - RNA, 19 nt, Artificial Sequence
  Description of Artificial Sequence: Synthetic oligonucleotide
cuggaaucgauacuuguau

SEQ ID NO: 200 - RNA, 19 nt, Artificial Sequence
  Description of Artificial Sequence: Synthetic oligonucleotide
uggaaucgauacuuguauu

SEQ ID NO: 201 - RNA, 19 nt, Artificial Sequence
  Description of Artificial Sequence: Synthetic oligonucleotide
ggaaucgauacuuguauuu

SEQ ID NO: 202 - RNA, 19 nt, Artificial Sequence
  Description of Artificial Sequence: Synthetic oligonucleotide
gaaucgauacuuguauuuu

SEQ ID NO: 203 - RNA, 19 nt, Artificial Sequence
  Description of Artificial Sequence: Synthetic oligonucleotide
aaucgauacuuguauuuuu

SEQ ID NO: 204 - RNA, 19 nt, Artificial Sequence
  Description of Artificial Sequence: Synthetic oligonucleotide
aucgauacuuguauuuuuc

SEQ ID NO: 205 - RNA, 19 nt, Artificial Sequence
  Description of Artificial Sequence: Synthetic oligonucleotide
ucgauacuuguauuuuucu

SEQ ID NO: 206 - RNA, 19 nt, Artificial Sequence
  Description of Artificial Sequence: Synthetic oligonucleotide
cgauacuuguauuuuucua

SEQ ID NO: 207 - RNA, 19 nt, Artificial Sequence
  Description of Artificial Sequence: Synthetic oligonucleotide
gauacuuguauuuuucuag

SEQ ID NO: 208 - RNA, 19 nt, Artificial Sequence
  Description of Artificial Sequence: Synthetic oligonucleotide
auacuuguauuuuucuagu

SEQ ID NO: 209 - RNA, 19 nt, Artificial Sequence
  Description of Artificial Sequence: Synthetic oligonucleotide
uacuuguauuuuucuagua

SEQ ID NO: 210 - RNA, 19 nt, Artificial Sequence
  Description of Artificial Sequence: Synthetic oligonucleotide
acuuguauuuuucuaguac

SEQ ID NO: 211 - RNA, 19 nt, Artificial Sequence
  Description of Artificial Sequence: Synthetic oligonucleotide
cuuguauuuuucuaguacc

SEQ ID NO: 212 - RNA, 19 nt, Artificial Sequence
  Description of Artificial Sequence: Synthetic oligonucleotide
uuguauuuuucuaguacca

SEQ ID NO: 213 - RNA, 19 nt, Artificial Sequence
  Description of Artificial Sequence: Synthetic oligonucleotide
uguauuuuucuaguaccaa

SEQ ID NO: 214 - RNA, 19 nt, Artificial Sequence
  Description of Artificial Sequence: Synthetic oligonucleotide
guauuuuucuaguaccaag

SEQ ID NO: 215 - RNA, 19 nt, Artificial Sequence
  Description of Artificial Sequence: Synthetic oligonucleotide
uauuuuucuaguaccaagu

SEQ ID NO: 216 - RNA, 19 nt, Artificial Sequence
  Description of Artificial Sequence: Synthetic oligonucleotide
auuuuucuaguaccaaguu

SEQ ID NO: 217 - RNA, 19 nt, Artificial Sequence
  Description of Artificial Sequence: Synthetic oligonucleotide
uuuuucuaguaccaaguua

SEQ ID NO: 218 - RNA, 19 nt, Artificial Sequence
  Description of Artificial Sequence: Synthetic oligonucleotide
uuuucuaguaccaaguuac

SEQ ID NO: 219 - RNA, 19 nt, Artificial Sequence
  Description of Artificial Sequence: Synthetic oligonucleotide
uuucuaguaccaaguuacg

SEQ ID NO: 220 - RNA, 19 nt, Artificial Sequence
  Description of Artificial Sequence: Synthetic oligonucleotide
uucuaguaccaaguuacgu

SEQ ID NO: 221 - RNA, 19 nt, Artificial Sequence
  Description of Artificial Sequence: Synthetic oligonucleotide
ucuaguaccaaguuacgug

SEQ ID NO: 222 - RNA, 19 nt, Artificial Sequence
  Description of Artificial Sequence: Synthetic oligonucleotide
cuaguaccaaguuacgugc

SEQ ID NO: 223 - RNA, 19 nt, Artificial Sequence
  Description of Artificial Sequence: Synthetic oligonucleotide
uaguaccaaguuacgugca

SEQ ID NO: 224 - RNA, 19 nt, Artificial Sequence
  Description of Artificial Sequence: Synthetic oligonucleotide
aguaccaaguuacgugcac

SEQ ID NO: 225 - RNA, 19 nt, Artificial Sequence
  Description of Artificial Sequence: Synthetic oligonucleotide
guaccaaguuacgugcacc

SEQ ID NO: 226 - RNA, 19 nt, Artificial Sequence
  Description of Artificial Sequence: Synthetic oligonucleotide
uaccaaguuacgugcacca

SEQ ID NO: 227 - RNA, 19 nt, Artificial Sequence
  Description of Artificial Sequence: Synthetic oligonucleotide
accaaguuacgugcaccaa

SEQ ID NO: 228 - RNA, 19 nt, Artificial Sequence
  Description of Artificial Sequence: Synthetic oligonucleotide
ccaaguuacgugcaccaaa

SEQ ID NO: 229 - RNA, 19 nt, Artificial Sequence
  Description of Artificial Sequence: Synthetic oligonucleotide
caaguuacgugcaccaaau

SEQ ID NO: 230 - RNA, 19 nt, Artificial Sequence
  Description of Artificial Sequence: Synthetic oligonucleotide
aaguuacgugcaccaaauu

SEQ ID NO: 231 - RNA, 19 nt, Artificial Sequence
  Description of Artificial Sequence: Synthetic oligonucleotide
aguuacgugcaccaaauua

SEQ ID NO: 232 - RNA, 19 nt, Artificial Sequence
  Description of Artificial Sequence: Synthetic oligonucleotide
guuacgugcaccaaauuau

SEQ ID NO: 233 - RNA, 19 nt, Artificial Sequence
  Description of Artificial Sequence: Synthetic oligonucleotide
uuacgugcaccaaauuaua

SEQ ID NO: 234 - RNA, 19 nt, Artificial Sequence
  Description of Artificial Sequence: Synthetic oligonucleotide
uacgugcaccaaauuauaa

SEQ ID NO: 235 - RNA, 19 nt, Artificial Sequence
  Description of Artificial Sequence: Synthetic oligonucleotide
acgugcaccaaauuauaaa

SEQ ID NO: 236 - RNA, 19 nt, Artificial Sequence
  Description of Artificial Sequence: Synthetic oligonucleotide
cgugcaccaaauuauaaaa

SEQ ID NO: 237 - RNA, 19 nt, Artificial Sequence
  Description of Artificial Sequence: Synthetic oligonucleotide
gugcaccaaauuauaaaac

SEQ ID NO: 238 - RNA, 19 nt, Artificial Sequence
  Description of Artificial Sequence: Synthetic oligonucleotide
ugcaccaaauuauaaaaca

SEQ ID NO: 239 - RNA, 19 nt, Artificial Sequence
  Description of Artificial Sequence: Synthetic oligonucleotide
gcaccaaauuauaaaacac

SEQ ID NO: 240 - RNA, 19 nt, Artificial Sequence
  Description of Artificial Sequence: Synthetic oligonucleotide
caccaaauuauaaaacacu

SEQ ID NO: 241 - RNA, 19 nt, Artificial Sequence
  Description of Artificial Sequence: Synthetic oligonucleotide
accaaauuauaaaacacuu

SEQ ID NO: 242 - RNA, 19 nt, Artificial Sequence
  Description of Artificial Sequence: Synthetic oligonucleotide
ccaaauuauaaaacacuuu

SEQ ID NO: 243 - RNA, 19 nt, Artificial Sequence
  Description of Artificial Sequence: Synthetic oligonucleotide
caaauuauaaaacacuuuu

SEQ ID NO: 244 - RNA, 19 nt, Artificial Sequence
  Description of Artificial Sequence: Synthetic oligonucleotide
aaauuauaaaacacuuuuu

SEQ ID NO: 245 - RNA, 19 nt, Artificial Sequence
  Description of Artificial Sequence: Synthetic oligonucleotide
aauuauaaaacacuuuuuu

SEQ ID NO: 246 - RNA, 19 nt, Artificial Sequence
  Description of Artificial Sequence: Synthetic oligonucleotide
auuauaaaacacuuuuuua

SEQ ID NO: 247 - RNA, 19 nt, Artificial Sequence
  Description of Artificial Sequence: Synthetic oligonucleotide
uuauaaaacacuuuuuuau

SEQ ID NO: 248 - RNA, 19 nt, Artificial Sequence
  Description of Artificial Sequence: Synthetic oligonucleotide
uauaaaacacuuuuuuaua

SEQ ID NO: 249 - RNA, 19 nt, Artificial Sequence
  Description of Artificial Sequence: Synthetic oligonucleotide
auaaaacacuuuuuuauaa

SEQ ID NO: 250 - RNA, 19 nt, Artificial Sequence
  Description of Artificial Sequence: Synthetic oligonucleotide
uaaaacacuuuuuuauaau

SEQ ID NO: 251 - RNA, 19 nt, Artificial Sequence
  Description of Artificial Sequence: Synthetic oligonucleotide
aaaacacuuuuuuauaaua

SEQ ID NO: 252 - RNA, 19 nt, Artificial Sequence
  Description of Artificial Sequence: Synthetic oligonucleotide
aaacacuuuuuuauaauau

SEQ ID NO: 253 - RNA, 19 nt, Artificial Sequence
  Description of Artificial Sequence: Synthetic oligonucleotide
aacacuuuuuuauaauauu

SEQ ID NO: 254 - RNA, 19 nt, Artificial Sequence
  Description of Artificial Sequence: Synthetic oligonucleotide
acacuuuuuuauaauauuu

SEQ ID NO: 255 - RNA, 19 nt, Artificial Sequence
  Description of Artificial Sequence: Synthetic oligonucleotide
cacuuuuuuauaauauuuu

SEQ ID NO: 256 - RNA, 19 nt, Artificial Sequence
  Description of Artificial Sequence: Synthetic oligonucleotide
acuuuuuuauaauauuuuc

SEQ ID NO: 257 - RNA, 19 nt, Artificial Sequence
  Description of Artificial Sequence: Synthetic oligonucleotide
cuuuuuuauaauauuuucu

SEQ ID NO: 258 - RNA, 19 nt, Artificial Sequence
  Description of Artificial Sequence: Synthetic oligonucleotide
uuuuuuauaauauuuucuc

SEQ ID NO: 259 - RNA, 19 nt, Artificial Sequence
  Description of Artificial Sequence: Synthetic oligonucleotide
uuuuuauaauauuuucuca

SEQ ID NO: 260 - RNA, 19 nt, Artificial Sequence
  Description of Artificial Sequence: Synthetic oligonucleotide
uuuuauaauauuuucucac

SEQ ID NO: 261 - RNA, 19 nt, Artificial Sequence
  Description of Artificial Sequence: Synthetic oligonucleotide
uuuauaauauuuucucacu

SEQ ID NO: 262 - RNA, 19 nt, Artificial Sequence
  Description of Artificial Sequence: Synthetic oligonucleotide
uuauaauauuuucucacug

SEQ ID NO: 263 - RNA, 19 nt, Artificial Sequence
  Description of Artificial Sequence: Synthetic oligonucleotide
uauaauauuuucucacuga

SEQ ID NO: 264 - RNA, 19 nt, Artificial Sequence
  Description of Artificial Sequence: Synthetic oligonucleotide
auaauauuuucucacugag

SEQ ID NO: 265 - RNA, 19 nt, Artificial Sequence
  Description of Artificial Sequence: Synthetic oligonucleotide
uaauauuuucucacugaga

SEQ ID NO: 266 - RNA, 19 nt, Artificial Sequence
  Description of Artificial Sequence: Synthetic oligonucleotide
aauauuuucucacugagac

SEQ ID NO: 267 - RNA, 19 nt, Artificial Sequence
  Description of Artificial Sequence: Synthetic oligonucleotide
auauuuucucacugagacu

SEQ ID NO: 268 - RNA, 19 nt, Artificial Sequence
  Description of Artificial Sequence: Synthetic oligonucleotide
uauuuucucacugagacuc

SEQ ID NO: 269 - RNA, 19 nt, Artificial Sequence
  Description of Artificial Sequence: Synthetic oligonucleotide
auuuucucacugagacucc

SEQ ID NO: 270 - RNA, 19 nt, Artificial Sequence
  Description of Artificial Sequence: Synthetic oligonucleotide
uuuucucacugagacuccc

SEQ ID NO: 271 - RNA, 19 nt, Artificial Sequence
  Description of Artificial Sequence: Synthetic oligonucleotide
uuucucacugagacuccca

SEQ ID NO: 272 - RNA, 19 nt, Artificial Sequence
  Description of Artificial Sequence: Synthetic oligonucleotide
uucucacugagacucccag

SEQ ID NO: 273 - RNA, 19 nt, Artificial Sequence
  Description of Artificial Sequence: Synthetic oligonucleotide
ucucacugagacucccagg

SEQ ID NO: 274 - RNA, 19 nt, Artificial Sequence
  Description of Artificial Sequence: Synthetic oligonucleotide
cucacugagacucccaggg

SEQ ID NO: 275 - RNA, 19 nt, Artificial Sequence
  Description of Artificial Sequence: Synthetic oligonucleotide
ucacugagacucccagggc

SEQ ID NO: 276 - RNA, 19 nt, Artificial Sequence
  Description of Artificial Sequence: Synthetic oligonucleotide
cacugagacucccagggcu

SEQ ID NO: 277 - RNA, 19 nt, Artificial Sequence
  Description of Artificial Sequence: Synthetic oligonucleotide
acugagacucccagggcuu

SEQ ID NO: 278 - RNA, 19 nt, Artificial Sequence
  Description of Artificial Sequence: Synthetic oligonucleotide
cugagacucccagggcuuu

SEQ ID NO: 279 - RNA, 19 nt, Artificial Sequence
  Description of Artificial Sequence: Synthetic oligonucleotide
ugagacucccagggcuuuu

SEQ ID NO: 280 - RNA, 19 nt, Artificial Sequence
  Description of Artificial Sequence: Synthetic oligonucleotide
gagacucccagggcuuuua

SEQ ID NO: 281 - RNA, 19 nt, Artificial Sequence
  Description of Artificial Sequence: Synthetic oligonucleotide
agacucccagggcuuuuac

SEQ ID NO: 282 - RNA, 19 nt, Artificial Sequence
  Description of Artificial Sequence: Synthetic oligonucleotide
gacucccagggcuuuuacu

SEQ ID NO: 283 - RNA, 19 nt, Artificial Sequence
  Description of Artificial Sequence: Synthetic oligonucleotide
acucccagggcuuuuacua

SEQ ID NO: 284 - RNA, 19 nt, Artificial Sequence
  Description of Artificial Sequence: Synthetic oligonucleotide
cucccagggcuuuuacuau

SEQ ID NO: 285 - RNA, 19 nt, Artificial Sequence
  Description of Artificial Sequence: Synthetic oligonucleotide
ucccagggcuuuuacuauc

SEQ ID NO: 286 - RNA, 19 nt, Artificial Sequence
  Description of Artificial Sequence: Synthetic oligonucleotide
cccagggcuuuuacuaucu

SEQ ID NO: 287 - RNA, 19 nt, Artificial Sequence
  Description of Artificial Sequence: Synthetic oligonucleotide
ccagggcuuuuacuaucuc

SEQ ID NO: 288 - RNA, 19 nt, Artificial Sequence
  Description of Artificial Sequence: Synthetic oligonucleotide
cagggcuuuuacuaucucc

SEQ ID NO: 289 - RNA, 19 nt, Artificial Sequence
  Description of Artificial Sequence: Synthetic oligonucleotide
agggcuuuuacuaucucca

SEQ ID NO: 290 - RNA, 19 nt, Artificial Sequence
  Description of Artificial Sequence: Synthetic oligonucleotide
gggcuuuuacuaucuccag

SEQ ID NO: 291 - RNA, 19 nt, Artificial Sequence
  Description of Artificial Sequence: Synthetic oligonucleotide
ggcuuuuacuaucuccaga

SEQ ID NO: 292 - RNA, 19 nt, Artificial Sequence
  Description of Artificial Sequence: Synthetic oligonucleotide
gcuuuuacuaucuccagaa

SEQ ID NO: 293 - RNA, 19 nt, Artificial Sequence
  Description of Artificial Sequence: Synthetic oligonucleotide
cuuuuacuaucuccagaau

SEQ ID NO: 294 - RNA, 19 nt, Artificial Sequence
  Description of Artificial Sequence: Synthetic oligonucleotide
uuuuacuaucuccagaaug

SEQ ID NO: 295 - RNA, 19 nt, Artificial Sequence
  Description of Artificial Sequence: Synthetic oligonucleotide
uuuacuaucuccagaaugu

SEQ ID NO: 296 - RNA, 19 nt, Artificial Sequence
  Description of Artificial Sequence: Synthetic oligonucleotide
uuacuaucuccagaaugua

SEQ ID NO: 297 - RNA, 19 nt, Artificial Sequence
  Description of Artificial Sequence: Synthetic oligonucleotide
uacuaucuccagaauguau

SEQ ID NO: 298 - RNA, 19 nt, Artificial Sequence
  Description of Artificial Sequence: Synthetic oligonucleotide
acuaucuccagaauguauu

SEQ ID NO: 299 - RNA, 19 nt, Artificial Sequence
  Description of Artificial Sequence: Synthetic oligonucleotide
cuaucuccagaauguauuu

SEQ ID NO: 300 - RNA, 19 nt, Artificial Sequence
  Description of Artificial Sequence: Synthetic oligonucleotide
uaucuccagaauguauuuu

SEQ ID NO: 301 - RNA, 19 nt, Artificial Sequence
  Description of Artificial Sequence: Synthetic oligonucleotide
aucuccagaauguauuuuu

SEQ ID NO: 302 - RNA, 19 nt, Artificial Sequence
  Description of Artificial Sequence: Synthetic oligonucleotide
ucuccagaauguauuuuuc

SEQ ID NO: 303 - RNA, 19 nt, Artificial Sequence
  Description of Artificial Sequence: Synthetic oligonucleotide
cuccagaauguauuuuucc

SEQ ID NO: 304 - RNA, 19 nt, Artificial Sequence
  Description of Artificial Sequence: Synthetic oligonucleotide
uccagaauguauuuuuccu

SEQ ID NO: 305 - RNA, 19 nt, Artificial Sequence
  Description of Artificial Sequence: Synthetic oligonucleotide
ccagaauguauuuuuccuu

SEQ ID NO: 306 - RNA, 19 nt, Artificial Sequence
  Description of Artificial Sequence: Synthetic oligonucleotide
cagaauguauuuuuccuuu

SEQ ID NO: 307 - RNA, 19 nt, Artificial Sequence
  Description of Artificial Sequence: Synthetic oligonucleotide
agaauguauuuuuccuuuu

SEQ ID NO: 308 - RNA, 19 nt, Artificial Sequence
  Description of Artificial Sequence: Synthetic oligonucleotide
gaauguauuuuuccuuuuu

SEQ ID NO: 309 - RNA, 19 nt, Artificial Sequence
  Description of Artificial Sequence: Synthetic oligonucleotide
aauguauuuuuccuuuuuc

SEQ ID NO: 310 - RNA, 19 nt, Artificial Sequence
  Description of Artificial Sequence: Synthetic oligonucleotide
auguauuuuuccuuuuucc

SEQ ID NO: 311 - RNA, 19 nt, Artificial Sequence
  Description of Artificial Sequence: Synthetic oligonucleotide
uguauuuuuccuuuuuccg

SEQ ID NO: 312 - RNA, 19 nt, Artificial Sequence
  Description of Artificial Sequence: Synthetic oligonucleotide
guauuuuuccuuuuuccgu

SEQ ID NO: 313 - RNA, 19 nt, Artificial Sequence
  Description of Artificial Sequence: Synthetic oligonucleotide
uauuuuuccuuuuuccgua

SEQ ID NO: 314 - RNA, 19 nt, Artificial Sequence
  Description of Artificial Sequence: Synthetic oligonucleotide
auuuuuccuuuuuccguaa

SEQ ID NO: 315 - RNA, 19 nt, Artificial Sequence
  Description of Artificial Sequence: Synthetic oligonucleotide
uuuuuccuuuuuccguaag

SEQ ID NO: 316 - RNA, 19 nt, Artificial Sequence
  Description of Artificial Sequence: Synthetic oligonucleotide
uuuuccuuuuuccguaaga

SEQ ID NO: 317 - RNA, 19 nt, Artificial Sequence
  Description of Artificial Sequence: Synthetic oligonucleotide
uuuccuuuuuccguaagac

SEQ ID NO: 318 - RNA, 19 nt, Artificial Sequence
  Description of Artificial Sequence: Synthetic oligonucleotide
uuccuuuuuccguaagacu

SEQ ID NO: 319 - RNA, 19 nt, Artificial Sequence
  Description of Artificial Sequence: Synthetic oligonucleotide
uccuuuuuccguaagacuc

SEQ ID NO: 320 - RNA, 19 nt, Artificial Sequence
  Description of Artificial Sequence: Synthetic oligonucleotide
ccuuuuuccguaagacuca

SEQ ID NO: 321 - RNA, 19 nt, Artificial Sequence
  Description of Artificial Sequence: Synthetic oligonucleotide
cuuuuuccguaagacucaa

SEQ ID NO: 322 - RNA, 19 nt, Artificial Sequence
  Description of Artificial Sequence: Synthetic oligonucleotide
uuuuuccguaagacucaaa

SEQ ID NO: 323 - RNA, 19 nt, Artificial Sequence
  Description of Artificial Sequence: Synthetic oligonucleotide
uuuuccguaagacucaaaa

SEQ ID NO: 324 - RNA, 19 nt, Artificial Sequence
  Description of Artificial Sequence: Synthetic oligonucleotide
uuuccguaagacucaaaag

SEQ ID NO: 325 - RNA, 19 nt, Artificial Sequence
  Description of Artificial Sequence: Synthetic oligonucleotide
uuccguaagacucaaaagu

SEQ ID NO: 326 - RNA, 19 nt, Artificial Sequence
  Description of Artificial Sequence: Synthetic oligonucleotide
uccguaagacucaaaagua

SEQ ID NO: 327 - RNA, 19 nt, Artificial Sequence
  Description of Artificial Sequence: Synthetic oligonucleotide
ccguaagacucaaaaguaa

SEQ ID NO: 328 - RNA, 19 nt, Artificial Sequence
  Description of Artificial Sequence: Synthetic oligonucleotide
cguaagacucaaaaguaau

SEQ ID NO: 329 - RNA, 19 nt, Artificial Sequence
  Description of Artificial Sequence: Synthetic oligonucleotide
guaagacucaaaaguaaua

SEQ ID NO: 330 - RNA, 19 nt, Artificial Sequence
  Description of Artificial Sequence: Synthetic oligonucleotide
uaagacucaaaaguaauau

SEQ ID NO: 331 - RNA, 19 nt, Artificial Sequence
  Description of Artificial Sequence: Synthetic oligonucleotide
aagacucaaaaguaauaua

SEQ ID NO: 332 - RNA, 19 nt, Artificial Sequence
  Description of Artificial Sequence: Synthetic oligonucleotide
agacucaaaaguaauauaa

SEQ ID NO: 333 - RNA, 19 nt, Artificial Sequence
  Description of Artificial Sequence: Synthetic oligonucleotide
gacucaaaaguaauauaag

SEQ ID NO: 334 - RNA, 19 nt, Artificial Sequence
  Description of Artificial Sequence: Synthetic oligonucleotide
acucaaaaguaauauaagg

SEQ ID NO: 335 - RNA, 19 nt, Artificial Sequence
  Description of Artificial Sequence: Synthetic oligonucleotide
cucaaaaguaauauaaggu

SEQ ID NO: 336 - RNA, 19 nt, Artificial Sequence
  Description of Artificial Sequence: Synthetic oligonucleotide
ucaaaaguaauauaagguc

SEQ ID NO: 337 - RNA, 19 nt, Artificial Sequence
  Description of Artificial Sequence: Synthetic oligonucleotide
caaaaguaauauaaggucu

SEQ ID NO: 338 - RNA, 19 nt, Artificial Sequence
  Description of Artificial Sequence: Synthetic oligonucleotide
aaaaguaauauaaggucua

SEQ ID NO: 339 - RNA, 19 nt, Artificial Sequence
  Description of Artificial Sequence: Synthetic oligonucleotide
aaaguaauauaaggucuac

SEQ ID NO: 340 - RNA, 19 nt, Artificial Sequence
  Description of Artificial Sequence: Synthetic oligonucleotide
aaguaauauaaggucuaca

SEQ ID NO: 341 - RNA, 19 nt, Artificial Sequence
  Description of Artificial Sequence: Synthetic oligonucleotide
aguaauauaaggucuacaa

SEQ ID NO: 342 - RNA, 19 nt, Artificial Sequence
  Description of Artificial Sequence: Synthetic oligonucleotide
guaauauaaggucuacaaa

SEQ ID NO: 343 - RNA, 19 nt, Artificial Sequence
  Description of Artificial Sequence: Synthetic oligonucleotide
uaauauaaggucuacaaaa

SEQ ID NO: 344 - RNA, 19 nt, Artificial Sequence
  Description of Artificial Sequence: Synthetic oligonucleotide
aauauaaggucuacaaaau

SEQ ID NO: 345 - RNA, 19 nt, Artificial Sequence
  Description of Artificial Sequence: Synthetic oligonucleotide
auauaaggucuacaaaauc

SEQ ID NO: 346 - RNA, 19 nt, Artificial Sequence
  Description of Artificial Sequence: Synthetic oligonucleotide
uauaaggucuacaaaaucu

SEQ ID NO: 347 - RNA, 19 nt, Artificial Sequence
  Description of Artificial Sequence: Synthetic oligonucleotide
auaaggucuacaaaaucua

SEQ ID NO: 348 - RNA, 19 nt, Artificial Sequence
  Description of Artificial Sequence: Synthetic oligonucleotide
uaaggucuacaaaaucuac

SEQ ID NO: 349 - RNA, 19 nt, Artificial Sequence
  Description of Artificial Sequence: Synthetic oligonucleotide
aaggucuacaaaaucuacu

SEQ ID NO: 350 - RNA, 19 nt, Artificial Sequence
  Description of Artificial Sequence: Synthetic oligonucleotide
aggucuacaaaaucuacua

SEQ ID NO: 351 - RNA, 19 nt, Artificial Sequence
  Description of Artificial Sequence: Synthetic oligonucleotide
ggucuacaaaaucuacuaa

SEQ ID NO: 352 - RNA, 19 nt, Artificial Sequence
  Description of Artificial Sequence: Synthetic oligonucleotide
gucuacaaaaucuacuaaa

SEQ ID NO: 353 - RNA, 19 nt, Artificial Sequence
  Description of Artificial Sequence: Synthetic oligonucleotide
ucuacaaaaucuacuaaaa

SEQ ID NO: 354 - RNA, 19 nt, Artificial Sequence
  Description of Artificial Sequence: Synthetic oligonucleotide
cuacaaaaucuacuaaaaa

SEQ ID NO: 355 - RNA, 19 nt, Artificial Sequence
  Description of Artificial Sequence: Synthetic oligonucleotide
uacaaaaucuacuaaaaag

SEQ ID NO: 356 - RNA, 19 nt, Artificial Sequence
  Description of Artificial Sequence: Synthetic oligonucleotide
acaaaaucuacuaaaaagu

SEQ ID NO: 357 - RNA, 19 nt, Artificial Sequence
  Description of Artificial Sequence: Synthetic oligonucleotide
caaaaucuacuaaaaaguc

SEQ ID NO: 358 - RNA, 19 nt, Artificial Sequence
  Description of Artificial Sequence: Synthetic oligonucleotide
aaaaucuacuaaaaagucu

SEQ ID NO: 359 - RNA, 19 nt, Artificial Sequence
  Description of Artificial Sequence: Synthetic oligonucleotide
aaaucuacuaaaaagucuc

SEQ ID NO: 360 - RNA, 19 nt, Artificial Sequence
  Description of Artificial Sequence: Synthetic oligonucleotide
aaucuacuaaaaagucucu

SEQ ID NO: 361 - RNA, 19 nt, Artificial Sequence
  Description of Artificial Sequence: Synthetic oligonucleotide
aucuacuaaaaagucucug

SEQ ID NO: 362 - RNA, 19 nt, Artificial Sequence
  Description of Artificial Sequence: Synthetic oligonucleotide
ucuacuaaaaagucucugc

SEQ ID NO: 363 - RNA, 19 nt, Artificial Sequence
  Description of Artificial Sequence: Synthetic oligonucleotide
cuacuaaaaagucucugca

SEQ ID NO: 364 - RNA, 19 nt, Artificial Sequence
  Description of Artificial Sequence: Synthetic oligonucleotide
uacuaaaaagucucugcaa

SEQ ID NO: 365 - RNA, 19 nt, Artificial Sequence
  Description of Artificial Sequence: Synthetic oligonucleotide
acuaaaaagucucugcaaa

SEQ ID NO: 366 - RNA, 19 nt, Artificial Sequence
  Description of Artificial Sequence: Synthetic oligonucleotide
cuaaaaagucucugcaaaa

SEQ ID NO: 367 - RNA, 19 nt, Artificial Sequence
  Description of Artificial Sequence: Synthetic oligonucleotide
uaaaaagucucugcaaaaa

SEQ ID NO: 368 - RNA, 19 nt, Artificial Sequence
  Description of Artificial Sequence: Synthetic oligonucleotide
aaaaagucucugcaaaaag

SEQ ID NO: 369 - RNA, 19 nt, Artificial Sequence
  Description of Artificial Sequence: Synthetic oligonucleotide
aaaagucucugcaaaaagu

SEQ ID NO: 370 - RNA, 19 nt, Artificial Sequence
  Description of Artificial Sequence: Synthetic oligonucleotide
aaagucucugcaaaaagua

SEQ ID NO: 371 - RNA, 19 nt, Artificial Sequence
  Description of Artificial Sequence: Synthetic oligonucleotide
aagucucugcaaaaaguag

SEQ ID NO: 372 - RNA, 19 nt, Artificial Sequence
  Description of Artificial Sequence: Synthetic oligonucleotide
agucucugcaaaaaguaga

SEQ ID NO: 373 - RNA, 19 nt, Artificial Sequence
  Description of Artificial Sequence: Synthetic oligonucleotide
gucucugcaaaaaguagau

SEQ ID NO: 374 - RNA, 19 nt, Artificial Sequence
  Description of Artificial Sequence: Synthetic oligonucleotide
ucucugcaaaaaguagaug

SEQ ID NO: 375 - RNA, 19 nt, Artificial Sequence
  Description of Artificial Sequence: Synthetic oligonucleotide
cucugcaaaaaguagauga

SEQ ID NO: 376 - RNA, 19 nt, Artificial Sequence
  Description of Artificial Sequence: Synthetic oligonucleotide
ucugcaaaaaguagaugaa

SEQ ID NO: 377 - RNA, 19 nt, Artificial Sequence
  Description of Artificial Sequence: Synthetic oligonucleotide
cugcaaaaaguagaugaag

SEQ ID NO: 378 - RNA, 19 nt, Artificial Sequence
  Description of Artificial Sequence: Synthetic oligonucleotide
ugcaaaaaguagaugaaga

SEQ ID NO: 379 - RNA, 19 nt, Artificial Sequence
  Description of Artificial Sequence: Synthetic oligonucleotide
gcaaaaaguagaugaagag

SEQ ID NO: 380 - RNA, 19 nt, Artificial Sequence
  Description of Artificial Sequence: Synthetic oligonucleotide
caaaaaguagaugaagagg

SEQ ID NO: 381 - RNA, 19 nt, Artificial Sequence
  Description of Artificial Sequence: Synthetic oligonucleotide
aaaaaguagaugaagagga

SEQ ID NO: 382 - RNA, 19 nt, Artificial Sequence
  Description of Artificial Sequence: Synthetic oligonucleotide
aaaaguagaugaagaggac

SEQ ID NO: 383 - RNA, 19 nt, Artificial Sequence
  Description of Artificial Sequence: Synthetic oligonucleotide
aaaguagaugaagaggacu

SEQ ID NO: 384 - RNA, 19 nt, Artificial Sequence
  Description of Artificial Sequence: Synthetic oligonucleotide
aaguagaugaagaggacuc

SEQ ID NO: 385 - RNA, 19 nt, Artificial Sequence
  Description of Artificial Sequence: Synthetic oligonucleotide
aguagaugaagaggacucu

SEQ ID NO: 386 - RNA, 19 nt, Artificial Sequence
  Description of Artificial Sequence: Synthetic oligonucleotide
guagaugaagaggacucug

SEQ ID NO: 387 - RNA, 19 nt, Artificial Sequence
  Description of Artificial Sequence: Synthetic oligonucleotide
uagaugaagaggacucuga

SEQ ID NO: 388 - RNA, 19 nt, Artificial Sequence
  Description of Artificial Sequence: Synthetic oligonucleotide
agaugaagaggacucugau

SEQ ID NO: 389 - RNA, 19 nt, Artificial Sequence
  Description of Artificial Sequence: Synthetic oligonucleotide
gaugaagaggacucugaug

SEQ ID NO: 390 - RNA, 19 nt, Artificial Sequence
  Description of Artificial Sequence: Synthetic oligonucleotide
augaagaggacucugauga

SEQ ID NO: 391 - RNA, 19 nt, Artificial Sequence
  Description of Artificial Sequence: Synthetic oligonucleotide
ugaagaggacucugaugaa

SEQ ID NO: 392 - RNA, 19 nt, Artificial Sequence
  Description of Artificial Sequence: Synthetic oligonucleotide
gaagaggacucugaugaag

SEQ ID NO: 393 - RNA, 19 nt, Artificial Sequence
  Description of Artificial Sequence: Synthetic oligonucleotide
aagaggacucugaugaaga

SEQ ID NO: 394 - RNA, 19 nt, Artificial Sequence
  Description of Artificial Sequence: Synthetic oligonucleotide
agaggacucugaugaagaa

SEQ ID NO: 395 - RNA, 19 nt, Artificial Sequence
  Description of Artificial Sequence: Synthetic oligonucleotide
gaggacucugaugaagaaa

SEQ ID NO: 396 - RNA, 19 nt, Artificial Sequence
  Description of Artificial Sequence: Synthetic oligonucleotide
aggacucugaugaagaaag

SEQ ID NO: 397 - RNA, 19 nt, Artificial Sequence
  Description of Artificial Sequence: Synthetic oligonucleotide
ggacucugaugaagaaagc

SEQ ID NO: 398 - RNA, 19 nt, Artificial Sequence
  Description of Artificial Sequence: Synthetic oligonucleotide
gacucugaugaagaaagcc

SEQ ID NO: 399 - RNA, 19 nt, Artificial Sequence
  Description of Artificial Sequence: Synthetic oligonucleotide
acucugaugaagaaagcca

SEQ ID NO: 400 - RNA, 19 nt, Artificial Sequence
  Description of Artificial Sequence: Synthetic oligonucleotide
cucugaugaagaaagccau

SEQ ID NO: 401 - RNA, 19 nt, Artificial Sequence
  Description of Artificial Sequence: Synthetic oligonucleotide
ucugaugaagaaagccauc

SEQ ID NO: 402 - RNA, 19 nt, Artificial Sequence
  Description of Artificial Sequence: Synthetic oligonucleotide
cugaugaagaaagccauca

SEQ ID NO: 403 - RNA, 19 nt, Artificial Sequence
  Description of Artificial Sequence: Synthetic oligonucleotide
ugaugaagaaagccaucau

SEQ ID NO: 404 - RNA, 19 nt, Artificial Sequence
  Description of Artificial Sequence: Synthetic oligonucleotide
gaugaagaaagccaucaug

SEQ ID NO: 405 - RNA, 19 nt, Artificial Sequence
  Description of Artificial Sequence: Synthetic oligonucleotide
augaagaaagccaucauga

SEQ ID NO: 406 - RNA, 19 nt, Artificial Sequence
  Description of Artificial Sequence: Synthetic oligonucleotide
ugaagaaagccaucaugau

SEQ ID NO: 407 - RNA, 19 nt, Artificial Sequence
  Description of Artificial Sequence: Synthetic oligonucleotide
gaagaaagccaucaugaug

SEQ ID NO: 408 - RNA, 19 nt, Artificial Sequence
  Description of Artificial Sequence: Synthetic oligonucleotide
aagaaagccaucaugauga

SEQ ID NO: 409 - RNA, 19 nt, Artificial Sequence
  Description of Artificial Sequence: Synthetic oligonucleotide
agaaagccaucaugaugag

SEQ ID NO: 410 - RNA, 19 nt, Artificial Sequence
  Description of Artificial Sequence: Synthetic oligonucleotide
gaaagccaucaugaugaga

SEQ ID NO: 411 - RNA, 19 nt, Artificial Sequence
  Description of Artificial Sequence: Synthetic oligonucleotide
aaagccaucaugaugagau

SEQ ID NO: 412 - RNA, 19 nt, Artificial Sequence
  Description of Artificial Sequence: Synthetic oligonucleotide
aagccaucaugaugagaug

SEQ ID NO: 413 - RNA, 19 nt, Artificial Sequence
  Description of Artificial Sequence: Synthetic oligonucleotide
agccaucaugaugagauga

SEQ ID NO: 414 - RNA, 19 nt, Artificial Sequence
  Description of Artificial Sequence: Synthetic oligonucleotide
gccaucaugaugagaugag

SEQ ID NO: 415 - RNA, 19 nt, Artificial Sequence
  Description of Artificial Sequence: Synthetic oligonucleotide
ccaucaugaugagaugagu

SEQ ID NO: 416 - RNA, 19 nt, Artificial Sequence
  Description of Artificial Sequence: Synthetic oligonucleotide
caucaugaugagaugagug

SEQ ID NO: 417 - RNA, 19 nt, Artificial Sequence
  Description of Artificial Sequence: Synthetic oligonucleotide
aucaugaugagaugaguga

SEQ ID NO: 418 - RNA, 19 nt, Artificial Sequence
  Description of Artificial Sequence: Synthetic oligonucleotide
ucaugaugagaugagugag

SEQ ID NO: 419 - RNA, 19 nt, Artificial Sequence
  Description of Artificial Sequence: Synthetic oligonucleotide
caugaugagaugagugagc

SEQ ID NO: 420 - RNA, 19 nt, Artificial Sequence
  Description of Artificial Sequence: Synthetic oligonucleotide
augaugagaugagugagca

SEQ ID NO: 421 - RNA, 19 nt, Artificial Sequence
  Description of Artificial Sequence: Synthetic oligonucleotide
ugaugagaugagugagcag

SEQ ID NO: 422 - RNA, 19 nt, Artificial Sequence
  Description of Artificial Sequence: Synthetic oligonucleotide
gaugagaugagugagcagg

SEQ ID NO: 423 - RNA, 19 nt, Artificial Sequence
  Description of Artificial Sequence: Synthetic oligonucleotide
augagaugagugagcagga

SEQ ID NO: 424 - RNA, 19 nt, Artificial Sequence
  Description of Artificial Sequence: Synthetic oligonucleotide
ugagaugagugagcaggaa

SEQ ID NO: 425 - RNA, 19 nt, Artificial Sequence
  Description of Artificial Sequence: Synthetic oligonucleotide
gagaugagugagcaggaag

SEQ ID NO: 426 - RNA, 19 nt, Artificial Sequence
  Description of Artificial Sequence: Synthetic oligonucleotide
agaugagugagcaggaaga

SEQ ID NO: 427 - RNA, 19 nt, Artificial Sequence
  Description of Artificial Sequence: Synthetic oligonucleotide
gaugagugagcaggaagag

SEQ ID NO: 428 - RNA, 19 nt, Artificial Sequence
  Description of Artificial Sequence: Synthetic oligonucleotide
augagugagcaggaagagg

SEQ ID NO: 429 - RNA, 19 nt, Artificial Sequence
  Description of Artificial Sequence: Synthetic oligonucleotide
ugagugagcaggaagagga

SEQ ID NO: 430 - RNA, 19 nt, Artificial Sequence
  Description of Artificial Sequence: Synthetic oligonucleotide
gagugagcaggaagaggag

SEQ ID NO: 431 - RNA, 19 nt, Artificial Sequence
  Description of Artificial Sequence: Synthetic oligonucleotide
agugagcaggaagaggagc

SEQ ID NO: 432 - RNA, 19 nt, Artificial Sequence
  Description of Artificial Sequence: Synthetic oligonucleotide
gugagcaggaagaggagcu

SEQ ID NO: 433 - RNA, 19 nt, Artificial Sequence
  Description of Artificial Sequence: Synthetic oligonucleotide
ugagcaggaagaggagcuu

SEQ ID NO: 434 - RNA, 19 nt, Artificial Sequence
  Description of Artificial Sequence: Synthetic oligonucleotide
gagcaggaagaggagcuug

SEQ ID NO: 435 - RNA, 19 nt, Artificial Sequence
  Description of Artificial Sequence: Synthetic oligonucleotide
agcaggaagaggagcuuga

SEQ ID NO: 436 - RNA, 19 nt, Artificial Sequence
  Description of Artificial Sequence: Synthetic oligonucleotide
gcaggaagaggagcuugag

SEQ ID NO: 437 - RNA, 19 nt, Artificial Sequence
  Description of Artificial Sequence: Synthetic oligonucleotide
caggaagaggagcuugagg

SEQ ID NO: 438 - RNA, 19 nt, Artificial Sequence
  Description of Artificial Sequence: Synthetic oligonucleotide
aggaagaggagcuugagga

SEQ ID NO: 439 - RNA, 19 nt, Artificial Sequence
  Description of Artificial Sequence: Synthetic oligonucleotide
ggaagaggagcuugaggau

SEQ ID NO: 440 - RNA, 19 nt, Artificial Sequence
  Description of Artificial Sequence: Synthetic oligonucleotide
gaagaggagcuugaggaug

SEQ ID NO: 441 - RNA, 19 nt, Artificial Sequence
  Description of Artificial Sequence: Synthetic oligonucleotide
aagaggagcuugaggauga

SEQ ID NO: 442 - RNA, 19 nt, Artificial Sequence
  Description of Artificial Sequence: Synthetic oligonucleotide
agaggagcuugaggaugau

SEQ ID NO: 443 - RNA, 19 nt, Artificial Sequence
  Description of Artificial Sequence: Synthetic oligonucleotide
gaggagcuugaggaugauc

SEQ ID NO: 444 - RNA, 19 nt, Artificial Sequence
  Description of Artificial Sequence: Synthetic oligonucleotide
aggagcuugaggaugaucc

SEQ ID NO: 445 - RNA, 19 nt, Artificial Sequence
  Description of Artificial Sequence: Synthetic oligonucleotide
ggagcuugaggaugauccu

SEQ ID NO: 446 - RNA, 19 nt, Artificial Sequence
  Description of Artificial Sequence: Synthetic oligonucleotide
gagcuugaggaugauccua

SEQ ID NO: 447 - RNA, 19 nt, Artificial Sequence
  Description of Artificial Sequence: Synthetic oligonucleotide
agcuugaggaugauccuac

SEQ ID NO: 448 - RNA, 19 nt, Artificial Sequence
  Description of Artificial Sequence: Synthetic oligonucleotide
gcuugaggaugauccuacu

SEQ ID NO: 449 - RNA, 19 nt, Artificial Sequence
  Description of Artificial Sequence: Synthetic oligonucleotide
cuugaggaugauccuacug

SEQ ID NO: 450 - RNA, 19 nt, Artificial Sequence
  Description of Artificial Sequence: Synthetic oligonucleotide
uugaggaugauccuacugu

SEQ ID NO: 451 - RNA, 19 nt, Artificial Sequence
  Description of Artificial Sequence: Synthetic oligonucleotide
ugaggaugauccuacugua

SEQ ID NO: 452 - RNA, 19 nt, Artificial Sequence
  Description of Artificial Sequence: Synthetic oligonucleotide
gaggaugauccuacuguag

SEQ ID NO: 453 - RNA, 19 nt, Artificial Sequence
  Description of Artificial Sequence: Synthetic oligonucleotide
aggaugauccuacuguagu

SEQ ID NO: 454 - RNA, 19 nt, Artificial Sequence
  Description of Artificial Sequence: Synthetic oligonucleotide
ggaugauccuacuguaguc

SEQ ID NO: 455 - RNA, 19 nt, Artificial Sequence
  Description of Artificial Sequence: Synthetic oligonucleotide
gaugauccuacuguaguca

SEQ ID NO: 456 - RNA, 19 nt, Artificial Sequence
  Description of Artificial Sequence: Synthetic oligonucleotide
augauccuacuguagucaa

SEQ ID NO: 457 - RNA, 19 nt, Artificial Sequence
  Description of Artificial Sequence: Synthetic oligonucleotide
ugauccuacuguagucaaa

SEQ ID NO: 458 - RNA, 19 nt, Artificial Sequence
  Description of Artificial Sequence: Synthetic oligonucleotide
gauccuacuguagucaaaa

SEQ ID NO: 459 - RNA, 19 nt, Artificial Sequence
  Description of Artificial Sequence: Synthetic oligonucleotide
auccuacuguagucaaaaa

SEQ ID NO: 460 - RNA, 19 nt, Artificial Sequence
  Description of Artificial Sequence: Synthetic oligonucleotide
uccuacuguagucaaaaac

SEQ ID NO: 461 - RNA, 19 nt, Artificial Sequence
  Description of Artificial Sequence: Synthetic oligonucleotide
ccuacuguagucaaaaacu

SEQ ID NO: 462 - RNA, 19 nt, Artificial Sequence
  Description of Artificial Sequence: Synthetic oligonucleotide
cuacuguagucaaaaacua

SEQ ID NO: 463 - RNA, 19 nt, Artificial Sequence
  Description of Artificial Sequence: Synthetic oligonucleotide
uacuguagucaaaaacuau

SEQ ID NO: 464 - RNA, 19 nt, Artificial Sequence
  Description of Artificial Sequence: Synthetic oligonucleotide
acuguagucaaaaacuaua

SEQ ID NO: 465 - RNA, 19 nt, Artificial Sequence
  Description of Artificial Sequence: Synthetic oligonucleotide
cuguagucaaaaacuauaa

SEQ ID NO: 466 - RNA, 19 nt, Artificial Sequence
  Description of Artificial Sequence: Synthetic oligonucleotide
uguagucaaaaacuauaaa

SEQ ID NO: 467 - RNA, 19 nt, Artificial Sequence
  Description of Artificial Sequence: Synthetic oligonucleotide
guagucaaaaacuauaaag

SEQ ID NO: 468 - RNA, 19 nt, Artificial Sequence
  Description of Artificial Sequence: Synthetic oligonucleotide
uagucaaaaacuauaaaga

SEQ ID NO: 469 - RNA, 19 nt, Artificial Sequence
  Description of Artificial Sequence: Synthetic oligonucleotide
agucaaaaacuauaaagac

SEQ ID NO: 470 - RNA, 19 nt, Artificial Sequence
  Description of Artificial Sequence: Synthetic oligonucleotide
gucaaaaacuauaaagacc

SEQ ID NO: 471 - RNA, 19 nt, Artificial Sequence
  Description of Artificial Sequence: Synthetic oligonucleotide
ucaaaaacuauaaagaccu

SEQ ID NO: 472 - RNA, 19 nt, Artificial Sequence
  Description of Artificial Sequence: Synthetic oligonucleotide
caaaaacuauaaagaccug

SEQ ID NO: 473 - RNA, 19 nt, Artificial Sequence
  Description of Artificial Sequence: Synthetic oligonucleotide
aaaaacuauaaagaccugg

SEQ ID NO: 474 - RNA, 19 nt, Artificial Sequence
  Description of Artificial Sequence: Synthetic oligonucleotide
aaaacuauaaagaccugga

SEQ ID NO: 475 - RNA, 19 nt, Artificial Sequence
  Description of Artificial Sequence: Synthetic oligonucleotide
aaacuauaaagaccuggaa

SEQ ID NO: 476 - RNA, 19 nt, Artificial Sequence
  Description of Artificial Sequence: Synthetic oligonucleotide
aacuauaaagaccuggaaa

SEQ ID NO: 477 - RNA, 19 nt, Artificial Sequence
  Description of Artificial Sequence: Synthetic oligonucleotide
acuauaaagaccuggaaaa

SEQ ID NO: 478 - RNA, 19 nt, Artificial Sequence
  Description of Artificial Sequence: Synthetic oligonucleotide
cuauaaagaccuggaaaaa

SEQ ID NO: 479 - RNA, 19 nt, Artificial Sequence
  Description of Artificial Sequence: Synthetic oligonucleotide
uauaaagaccuggaaaaag

SEQ ID NO: 480 - RNA, 19 nt, Artificial Sequence
  Description of Artificial Sequence: Synthetic oligonucleotide
auaaagaccuggaaaaagc

SEQ ID NO: 481 - RNA, 19 nt, Artificial Sequence
  Description of Artificial Sequence: Synthetic oligonucleotide
uaaagaccuggaaaaagca

SEQ ID NO: 482 - RNA, 19 nt, Artificial Sequence
  Description of Artificial Sequence: Synthetic oligonucleotide
aaagaccuggaaaaagcag

SEQ ID NO: 483 - RNA, 19 nt, Artificial Sequence
  Description of Artificial Sequence: Synthetic oligonucleotide
aagaccuggaaaaagcagu

SEQ ID NO: 484 - RNA, 19 nt, Artificial Sequence
  Description of Artificial Sequence: Synthetic oligonucleotide
agaccuggaaaaagcaguu

SEQ ID NO: 485 - RNA, 19 nt, Artificial Sequence
  Description of Artificial Sequence: Synthetic oligonucleotide
gaccuggaaaaagcaguuc

SEQ ID NO: 486 - RNA, 19 nt, Artificial Sequence
  Description of Artificial Sequence: Synthetic oligonucleotide
accuggaaaaagcaguuca

SEQ ID NO: 487 - RNA, 19 nt, Artificial Sequence
  Description of Artificial Sequence: Synthetic oligonucleotide
ccuggaaaaagcaguucag

SEQ ID NO: 488 - RNA, 19 nt, Artificial Sequence
  Description of Artificial Sequence: Synthetic oligonucleotide
cuggaaaaagcaguucagu

SEQ ID NO: 489 - RNA, 19 nt, Artificial Sequence
  Description of Artificial Sequence: Synthetic oligonucleotide
uggaaaaagcaguucaguc

SEQ ID NO: 490 - RNA, 19 nt, Artificial Sequence
  Description of Artificial Sequence: Synthetic oligonucleotide
ggaaaaagcaguucagucu

SEQ ID NO: 491 - RNA, 19 nt, Artificial Sequence
  Description of Artificial Sequence: Synthetic oligonucleotide
gaaaaagcaguucagucuu

SEQ ID NO: 492 - RNA, 19 nt, Artificial Sequence
  Description of Artificial Sequence: Synthetic oligonucleotide
aaaaagcaguucagucuuu

SEQ ID NO: 493 - RNA, 19 nt, Artificial Sequence
  Description of Artificial Sequence: Synthetic oligonucleotide
aaaagcaguucagucuuuu

SEQ ID NO: 494 - RNA, 19 nt, Artificial Sequence
  Description of Artificial Sequence: Synthetic oligonucleotide
aaagcaguucagucuuuuc

SEQ ID NO: 495 - RNA, 19 nt, Artificial Sequence
  Description of Artificial Sequence: Synthetic oligonucleotide
aagcaguucagucuuuucg

SEQ ID NO: 496 - RNA, 19 nt, Artificial Sequence
  Description of Artificial Sequence: Synthetic oligonucleotide
agcaguucagucuuuucgg

SEQ ID NO: 497 - RNA, 19 nt, Artificial Sequence
  Description of Artificial Sequence: Synthetic oligonucleotide
gcaguucagucuuuucggu

SEQ ID NO: 498 - RNA, 19 nt, Artificial Sequence
  Description of Artificial Sequence: Synthetic oligonucleotide
caguucagucuuuucggua

SEQ ID NO: 499 - RNA, 19 nt, Artificial Sequence
  Description of Artificial Sequence: Synthetic oligonucleotide
aguucagucuuuucgguau

SEQ ID NO: 500 - RNA, 19 nt, Artificial Sequence
  Description of Artificial Sequence: Synthetic oligonucleotide
guucagucuuuucgguaug

SEQ ID NO: 501 - RNA, 19 nt, Artificial Sequence
  Description of Artificial Sequence: Synthetic oligonucleotide
uucagucuuuucgguauga

SEQ ID NO: 502 - RNA, 19 nt, Artificial Sequence
  Description of Artificial Sequence: Synthetic oligonucleotide
ucagucuuuucgguaugau

SEQ ID NO: 503 - RNA, 19 nt, Artificial Sequence
  Description of Artificial Sequence: Synthetic oligonucleotide
cagucuuuucgguaugaug

SEQ ID NO: 504 - RNA, 19 nt, Artificial Sequence
  Description of Artificial Sequence: Synthetic oligonucleotide
agucuuuucgguaugaugu

SEQ ID NO: 505 - RNA, 19 nt, Artificial Sequence
  Description of Artificial Sequence: Synthetic oligonucleotide
gucuuuucgguaugauguu

SEQ ID NO: 506 - RNA, 19 nt, Artificial Sequence
  Description of Artificial Sequence: Synthetic oligonucleotide
ucuuuucgguaugauguug

SEQ ID NO: 507 - RNA, 19 nt, Artificial Sequence
  Description of Artificial Sequence: Synthetic oligonucleotide
cuuuucgguaugauguugu

SEQ ID NO: 508 - RNA, 19 nt, Artificial Sequence
  Description of Artificial Sequence: Synthetic oligonucleotide
uuuucgguaugauguuguc

SEQ ID NO: 509 - RNA, 19 nt, Artificial Sequence
  Description of Artificial Sequence: Synthetic oligonucleotide
uuucgguaugauguugucc

SEQ ID NO: 510 - RNA, 19 nt, Artificial Sequence
  Description of Artificial Sequence: Synthetic oligonucleotide
uucgguaugauguuguccu

SEQ ID NO: 511 - RNA, 19 nt, Artificial Sequence
  Description of Artificial Sequence: Synthetic oligonucleotide
ucgguaugauguuguccug

SEQ ID NO: 512 - RNA, 19 nt, Artificial Sequence
  Description of Artificial Sequence: Synthetic oligonucleotide
cgguaugauguuguccuga

SEQ ID NO: 513 - RNA, 19 nt, Artificial Sequence
  Description of Artificial Sequence: Synthetic oligonucleotide
gguaugauguuguccugaa

SEQ ID NO: 514 - RNA, 19 nt, Artificial Sequence
  Description of Artificial Sequence: Synthetic oligonucleotide
guaugauguuguccugaag

SEQ ID NO: 515 - RNA, 19 nt, Artificial Sequence
  Description of Artificial Sequence: Synthetic oligonucleotide
uaugauguuguccugaaga

SEQ ID NO: 516 - RNA, 19 nt, Artificial Sequence
  Description of Artificial Sequence: Synthetic oligonucleotide
augauguuguccugaagac

SEQ ID NO: 517 - RNA, 19 nt, Artificial Sequence
  Description of Artificial Sequence: Synthetic oligonucleotide
ugauguuguccugaagacg

SEQ ID NO: 518 - RNA, 19 nt, Artificial Sequence
  Description of Artificial Sequence: Synthetic oligonucleotide
gauguuguccugaagacgg

SEQ ID NO: 519 - RNA, 19 nt, Artificial Sequence
  Description of Artificial Sequence: Synthetic oligonucleotide
auguuguccugaagacggg

SEQ ID NO: 520 - RNA, 19 nt, Artificial Sequence
  Description of Artificial Sequence: Synthetic oligonucleotide
uguuguccugaagacgggg

SEQ ID NO: 521 - RNA, 19 nt, Artificial Sequence
  Description of Artificial Sequence: Synthetic oligonucleotide
guuguccugaagacggggc

SEQ ID NO: 522 - RNA, 19 nt, Artificial Sequence
  Description of Artificial Sequence: Synthetic oligonucleotide
uuguccugaagacggggcu

SEQ ID NO: 523 - RNA, 19 nt, Artificial Sequence
  Description of Artificial Sequence: Synthetic oligonucleotide
uguccugaagacggggcua

SEQ ID NO: 524 - RNA, 19 nt, Artificial Sequence
  Description of Artificial Sequence: Synthetic oligonucleotide
guccugaagacggggcuag

SEQ ID NO: 525 - RNA, 19 nt, Artificial Sequence
  Description of Artificial Sequence: Synthetic oligonucleotide
uccugaagacggggcuaga

SEQ ID NO: 526 - RNA, 19 nt, Artificial Sequence
  Description of Artificial Sequence: Synthetic oligonucleotide
ccugaagacggggcuagau

SEQ ID NO: 527 - RNA, 19 nt, Artificial Sequence
  Description of Artificial Sequence: Synthetic oligonucleotide
cugaagacggggcuagaua

SEQ ID NO: 528 - RNA, 19 nt, Artificial Sequence
  Description of Artificial Sequence: Synthetic oligonucleotide
ugaagacggggcuagauau

SEQ ID NO: 529 - RNA, 19 nt, Artificial Sequence
  Description of Artificial Sequence: Synthetic oligonucleotide
gaagacggggcuagauauu

SEQ ID NO: 530 - RNA, 19 nt, Artificial Sequence
  Description of Artificial Sequence: Synthetic oligonucleotide
aagacggggcuagauauug

SEQ ID NO: 531 - RNA, 19 nt, Artificial Sequence
  Description of Artificial Sequence: Synthetic oligonucleotide
agacggggcuagauauugg

SEQ ID NO: 532 - RNA, 19 nt, Artificial Sequence
  Description of Artificial Sequence: Synthetic oligonucleotide
gacggggcuagauauuggg

SEQ ID NO: 533 - RNA, 19 nt, Artificial Sequence
  Description of Artificial Sequence: Synthetic oligonucleotide
acggggcuagauauuggga

SEQ ID NO: 534 - RNA, 19 nt, Artificial Sequence
  Description of Artificial Sequence: Synthetic oligonucleotide
cggggcuagauauugggag

SEQ ID NO: 535 - RNA, 19 nt, Artificial Sequence
  Description of Artificial Sequence: Synthetic oligonucleotide
ggggcuagauauugggaga

SEQ ID NO: 536 - RNA, 19 nt, Artificial Sequence
  Description of Artificial Sequence: Synthetic oligonucleotide
gggcuagauauugggagaa

SEQ ID NO: 537 - RNA, 19 nt, Artificial Sequence
  Description of Artificial Sequence: Synthetic oligonucleotide
ggcuagauauugggagaaa

SEQ ID NO: 538 - RNA, 19 nt, Artificial Sequence
  Description of Artificial Sequence: Synthetic oligonucleotide
gcuagauauugggagaaac

SEQ ID NO: 539 - RNA, 19 nt, Artificial Sequence
  Description of Artificial Sequence: Synthetic oligonucleotide
cuagauauugggagaaaca

SEQ ID NO: 540 - RNA, 19 nt, Artificial Sequence
  Description of Artificial Sequence: Synthetic oligonucleotide
uagauauugggagaaacaa

SEQ ID NO: 541 - RNA, 19 nt, Artificial Sequence
  Description of Artificial Sequence: Synthetic oligonucleotide
agauauugggagaaacaaa

SEQ ID NO: 542 - RNA, 19 nt, Artificial Sequence
  Description of Artificial Sequence: Synthetic oligonucleotide
gauauugggagaaacaaag

SEQ ID NO: 543 - RNA, 19 nt, Artificial Sequence
  Description of Artificial Sequence: Synthetic oligonucleotide
auauugggagaaacaaagu

SEQ ID NO: 544 - RNA, 19 nt, Artificial Sequence
  Description of Artificial Sequence: Synthetic oligonucleotide
uauugggagaaacaaagug

SEQ ID NO: 545 - RNA, 19 nt, Artificial Sequence
  Description of Artificial Sequence: Synthetic oligonucleotide
auugggagaaacaaagugg

SEQ ID NO: 546 - RNA, 19 nt, Artificial Sequence
  Description of Artificial Sequence: Synthetic oligonucleotide
uugggagaaacaaagugga

SEQ ID NO: 547 - RNA, 19 nt, Artificial Sequence
  Description of Artificial Sequence: Synthetic oligonucleotide
ugggagaaacaaaguggaa

SEQ ID NO: 548 - RNA, 19 nt, Artificial Sequence
  Description of Artificial Sequence: Synthetic oligonucleotide
gggagaaacaaaguggaag

SEQ ID NO: 549 - RNA, 19 nt, Artificial Sequence
  Description of Artificial Sequence: Synthetic oligonucleotide
ggagaaacaaaguggaaga

SEQ ID NO: 550 - RNA, 19 nt, Artificial Sequence
  Description of Artificial Sequence: Synthetic oligonucleotide
gagaaacaaaguggaagau

SEQ ID NO: 551 - RNA, 19 nt, Artificial Sequence
  Description of Artificial Sequence: Synthetic oligonucleotide
agaaacaaaguggaagaug

SEQ ID NO: 552 - RNA, 19 nt, Artificial Sequence
  Description of Artificial Sequence: Synthetic oligonucleotide
gaaacaaaguggaagaugc

SEQ ID NO: 553 - RNA, 19 nt, Artificial Sequence
  Description of Artificial Sequence: Synthetic oligonucleotide
aaacaaaguggaagaugcu

SEQ ID NO: 554 - RNA, 19 nt, Artificial Sequence
  Description of Artificial Sequence: Synthetic oligonucleotide
aacaaaguggaagaugcuu

SEQ ID NO: 555 - RNA, 19 nt, Artificial Sequence
  Description of Artificial Sequence: Synthetic oligonucleotide
acaaaguggaagaugcuuu

SEQ ID NO: 556 - RNA, 19 nt, Artificial Sequence
  Description of Artificial Sequence: Synthetic oligonucleotide
caaaguggaagaugcuuuc

SEQ ID NO: 557 - RNA, 19 nt, Artificial Sequence
  Description of Artificial Sequence: Synthetic oligonucleotide
aaaguggaagaugcuuucu

SEQ ID NO: 558 - RNA, 19 nt, Artificial Sequence
  Description of Artificial Sequence: Synthetic oligonucleotide
aaguggaagaugcuuucua

SEQ ID NO: 559 - RNA, 19 nt, Artificial Sequence
  Description of Artificial Sequence: Synthetic oligonucleotide
aguggaagaugcuuucuac

SEQ ID NO: 560 - RNA, 19 nt, Artificial Sequence
  Description of Artificial Sequence: Synthetic oligonucleotide
guggaagaugcuuucuaca

SEQ ID NO: 561 - RNA, 19 nt, Artificial Sequence
  Description of Artificial Sequence: Synthetic oligonucleotide
uggaagaugcuuucuacaa

SEQ ID NO: 562 - RNA, 19 nt, Artificial Sequence
  Description of Artificial Sequence: Synthetic oligonucleotide
ggaagaugcuuucuacaaa

SEQ ID NO: 563 - RNA, 19 nt, Artificial Sequence
  Description of Artificial Sequence: Synthetic oligonucleotide
gaagaugcuuucuacaaag

SEQ ID NO: 564 - RNA, 19 nt, Artificial Sequence
  Description of Artificial Sequence: Synthetic oligonucleotide
aagaugcuuucuacaaagg

SEQ ID NO: 565 - RNA, 19 nt, Artificial Sequence
  Description of Artificial Sequence: Synthetic oligonucleotide
agaugcuuucuacaaaggu

SEQ ID NO: 566 - RNA, 19 nt, Artificial Sequence
  Description of Artificial Sequence: Synthetic oligonucleotide
gaugcuuucuacaaaggug

SEQ ID NO: 567 - RNA, 19 nt, Artificial Sequence
  Description of Artificial Sequence: Synthetic oligonucleotide
augcuuucuacaaagguga

SEQ ID NO: 568 - RNA, 19 nt, Artificial Sequence
  Description of Artificial Sequence: Synthetic oligonucleotide
ugcuuucuacaaaggugaa

SEQ ID NO: 569 - RNA, 19 nt, Artificial Sequence
  Description of Artificial Sequence: Synthetic oligonucleotide
gcuuucuacaaaggugaac

SEQ ID NO: 570 - RNA, 19 nt, Artificial Sequence
  Description of Artificial Sequence: Synthetic oligonucleotide
cuuucuacaaaggugaacu

SEQ ID NO: 571 - RNA, 19 nt, Artificial Sequence
  Description of Artificial Sequence: Synthetic oligonucleotide
uuucuacaaaggugaacuc

SEQ ID NO: 572 - RNA, 19 nt, Artificial Sequence
  Description of Artificial Sequence: Synthetic oligonucleotide
uucuacaaaggugaacuca

SEQ ID NO: 573 - RNA, 19 nt, Artificial Sequence
  Description of Artificial Sequence: Synthetic oligonucleotide
ucuacaaaggugaacucag

SEQ ID NO: 574 - RNA, 19 nt, Artificial Sequence
  Description of Artificial Sequence: Synthetic oligonucleotide
cuacaaaggugaacucagg

SEQ ID NO: 575 - RNA, 19 nt, Artificial Sequence
  Description of Artificial Sequence: Synthetic oligonucleotide
uacaaaggugaacucaggc

SEQ ID NO: 576 - RNA, 19 nt, Artificial Sequence
  Description of Artificial Sequence: Synthetic oligonucleotide
acaaaggugaacucaggcu

SEQ ID NO: 577 - RNA, 19 nt, Artificial Sequence
  Description of Artificial Sequence: Synthetic oligonucleotide
caaaggugaacucaggcug

SEQ ID NO: 578 - RNA, 19 nt, Artificial Sequence
  Description of Artificial Sequence: Synthetic oligonucleotide
aaaggugaacucaggcuga

SEQ ID NO: 579 - RNA, 19 nt, Artificial Sequence
  Description of Artificial Sequence: Synthetic oligonucleotide
aaggugaacucaggcugaa

SEQ ID NO: 580 - RNA, 19 nt, Artificial Sequence
  Description of Artificial Sequence: Synthetic oligonucleotide
aggugaacucaggcugaau

SEQ ID NO: 581 - RNA, 19 nt, Artificial Sequence
  Description of Artificial Sequence: Synthetic oligonucleotide
ggugaacucaggcugaaug

SEQ ID NO: 582 - RNA, 19 nt, Artificial Sequence
  Description of Artificial Sequence: Synthetic oligonucleotide
gugaacucaggcugaauga

SEQ ID NO: 583 - RNA, 19 nt, Artificial Sequence
  Description of Artificial Sequence: Synthetic oligonucleotide
ugaacucaggcugaaugag

SEQ ID NO: 584 - RNA, 19 nt, Artificial Sequence
  Description of Artificial Sequence: Synthetic oligonucleotide
gaacucaggcugaaugagg

SEQ ID NO: 585 - RNA, 19 nt, Artificial Sequence
  Description of Artificial Sequence: Synthetic oligonucleotide
aacucaggcugaaugagga

SEQ ID NO: 586 - RNA, 19 nt, Artificial Sequence
  Description of Artificial Sequence: Synthetic oligonucleotide
acucaggcugaaugaggaa

SEQ ID NO: 587 - RNA, 19 nt, Artificial Sequence
  Description of Artificial Sequence: Synthetic oligonucleotide
cucaggcugaaugaggaaa

SEQ ID NO: 588 - RNA, 19 nt, Artificial Sequence
  Description of Artificial Sequence: Synthetic oligonucleotide
ucaggcugaaugaggaaaa

SEQ ID NO: 589 - RNA, 19 nt, Artificial Sequence
  Description of Artificial Sequence: Synthetic oligonucleotide
caggcugaaugaggaaaaa

SEQ ID NO: 590 - RNA, 19 nt, Artificial Sequence
  Description of Artificial Sequence: Synthetic oligonucleotide
aggcugaaugaggaaaaau

SEQ ID NO: 591 - RNA, 19 nt, Artificial Sequence
  Description of Artificial Sequence: Synthetic oligonucleotide
ggcugaaugaggaaaaauu

SEQ ID NO: 592 - RNA, 19 nt, Artificial Sequence
  Description of Artificial Sequence: Synthetic oligonucleotide
gcugaaugaggaaaaauua

SEQ ID NO: 593 - RNA, 19 nt, Artificial Sequence
  Description of Artificial Sequence: Synthetic oligonucleotide
cugaaugaggaaaaauuau

SEQ ID NO: 594 - RNA, 19 nt, Artificial Sequence
  Description of Artificial Sequence: Synthetic oligonucleotide
ugaaugaggaaaaauuaug

SEQ ID NO: 595 - RNA, 19 nt, Artificial Sequence
  Description of Artificial Sequence: Synthetic oligonucleotide
gaaugaggaaaaauuaugg

SEQ ID NO: 596 - RNA, 19 nt, Artificial Sequence
  Description of Artificial Sequence: Synthetic oligonucleotide
aaugaggaaaaauuaugga

SEQ ID NO: 597 - RNA, 19 nt, Artificial Sequence
  Description of Artificial Sequence: Synthetic oligonucleotide
augaggaaaaauuauggaa

SEQ ID NO: 598 - RNA, 19 nt, Artificial Sequence
  Description of Artificial Sequence: Synthetic oligonucleotide
ugaggaaaaauuauggaag

SEQ ID NO: 599 - RNA, 19 nt, Artificial Sequence
  Description of Artificial Sequence: Synthetic oligonucleotide
gaggaaaaauuauggaaga

SEQ ID NO: 600 - RNA, 19 nt, Artificial Sequence
  Description of Artificial Sequence: Synthetic oligonucleotide
aggaaaaauuauggaagaa

SEQ ID NO: 601 - RNA, 19 nt, Artificial Sequence
  Description of Artificial Sequence: Synthetic oligonucleotide
ggaaaaauuauggaagaaa

SEQ ID NO: 602 - RNA, 19 nt, Artificial Sequence
  Description of Artificial Sequence: Synthetic oligonucleotide
gaaaaauuauggaagaaaa

SEQ ID NO: 603 - RNA, 19 nt, Artificial Sequence
  Description of Artificial Sequence: Synthetic oligonucleotide
aaaaauuauggaagaaaag

SEQ ID NO: 604 - RNA, 19 nt, Artificial Sequence
  Description of Artificial Sequence: Synthetic oligonucleotide
aaaauuauggaagaaaagc

SEQ ID NO: 605 - RNA, 19 nt, Artificial Sequence
  Description of Artificial Sequence: Synthetic oligonucleotide
aaauuauggaagaaaagca

SEQ ID NO: 606 - RNA, 19 nt, Artificial Sequence
  Description of Artificial Sequence: Synthetic oligonucleotide
aauuauggaagaaaagcag

SEQ ID NO: 607 - RNA, 19 nt, Artificial Sequence
  Description of Artificial Sequence: Synthetic oligonucleotide
auuauggaagaaaagcaga

SEQ ID NO: 608 - RNA, 19 nt, Artificial Sequence
  Description of Artificial Sequence: Synthetic oligonucleotide
uuauggaagaaaagcagaa

SEQ ID NO: 609 - RNA, 19 nt, Artificial Sequence
  Description of Artificial Sequence: Synthetic oligonucleotide
uauggaagaaaagcagaac

SEQ ID NO: 610 - RNA, 19 nt, Artificial Sequence
  Description of Artificial Sequence: Synthetic oligonucleotide
auggaagaaaagcagaacg

SEQ ID NO: 611 - RNA, 19 nt, Artificial Sequence
  Description of Artificial Sequence: Synthetic oligonucleotide
uggaagaaaagcagaacgg

SEQ ID NO: 612 - RNA, 19 nt, Artificial Sequence
  Description of Artificial Sequence: Synthetic oligonucleotide
ggaagaaaagcagaacggu

SEQ ID NO: 613 - RNA, 19 nt, Artificial Sequence
  Description of Artificial Sequence: Synthetic oligonucleotide
gaagaaaagcagaacggug

SEQ ID NO: 614 - RNA, 19 nt, Artificial Sequence
  Description of Artificial Sequence: Synthetic oligonucleotide
aagaaaagcagaacgguga

SEQ ID NO: 615 - RNA, 19 nt, Artificial Sequence
  Description of Artificial Sequence: Synthetic oligonucleotide
agaaaagcagaacggugaa

SEQ ID NO: 616 - RNA, 19 nt, Artificial Sequence
  Description of Artificial Sequence: Synthetic oligonucleotide
gaaaagcagaacggugaaa

SEQ ID NO: 617 - RNA, 19 nt, Artificial Sequence
  Description of Artificial Sequence: Synthetic oligonucleotide
aaaagcagaacggugaaag

SEQ ID NO: 618 - RNA, 19 nt, Artificial Sequence
  Description of Artificial Sequence: Synthetic oligonucleotide
aaagcagaacggugaaagu

SEQ ID NO: 619 - RNA, 19 nt, Artificial Sequence
  Description of Artificial Sequence: Synthetic oligonucleotide
aagcagaacggugaaagug

SEQ ID NO: 620 - RNA, 19 nt, Artificial Sequence
  Description of Artificial Sequence: Synthetic oligonucleotide
agcagaacggugaaagugg

SEQ ID NO: 621 - RNA, 19 nt, Artificial Sequence
  Description of Artificial Sequence: Synthetic oligonucleotide
gcagaacggugaaaguggg

SEQ ID NO: 622 - RNA, 19 nt, Artificial Sequence
  Description of Artificial Sequence: Synthetic oligonucleotide
cagaacggugaaaguggga

SEQ ID NO: 623 - RNA, 19 nt, Artificial Sequence
  Description of Artificial Sequence: Synthetic oligonucleotide
agaacggugaaagugggag

SEQ ID NO: 624 - RNA, 19 nt, Artificial Sequence
  Description of Artificial Sequence: Synthetic oligonucleotide
gaacggugaaagugggaga

SEQ ID NO: 625 - RNA, 19 nt, Artificial Sequence
  Description of Artificial Sequence: Synthetic oligonucleotide
aacggugaaagugggagau

SEQ ID NO: 626 - RNA, 19 nt, Artificial Sequence
  Description of Artificial Sequence: Synthetic oligonucleotide
acggugaaagugggagaua

SEQ ID NO: 627 - RNA, 19 nt, Artificial Sequence
  Description of Artificial Sequence: Synthetic oligonucleotide
cggugaaagugggagauac

SEQ ID NO: 628 - RNA, 19 nt, Artificial Sequence
  Description of Artificial Sequence: Synthetic oligonucleotide
ggugaaagugggagauaca

SEQ ID NO: 629 - RNA, 19 nt, Artificial Sequence
  Description of Artificial Sequence: Synthetic oligonucleotide
gugaaagugggagauacau

SEQ ID NO: 630 - RNA, 19 nt, Artificial Sequence
  Description of Artificial Sequence: Synthetic oligonucleotide
ugaaagugggagauacauu

SEQ ID NO: 631 - RNA, 19 nt, Artificial Sequence
  Description of Artificial Sequence: Synthetic oligonucleotide
gaaagugggagauacauug

SEQ ID NO: 632 - RNA, 19 nt, Artificial Sequence
  Description of Artificial Sequence: Synthetic oligonucleotide
aaagugggagauacauugg

SEQ ID NO: 633 - RNA, 19 nt, Artificial Sequence
  Description of Artificial Sequence: Synthetic oligonucleotide
aagugggagauacauugga

SEQ ID NO: 634 - RNA, 19 nt, Artificial Sequence
  Description of Artificial Sequence: Synthetic oligonucleotide
agugggagauacauuggau

SEQ ID NO: 635 - RNA, 19 nt, Artificial Sequence
  Description of Artificial Sequence: Synthetic oligonucleotide
gugggagauacauuggauc

SEQ ID NO: 636 - RNA, 19 nt, Artificial Sequence
  Description of Artificial Sequence: Synthetic oligonucleotide
ugggagauacauuggaucu

SEQ ID NO: 637 - RNA, 19 nt, Artificial Sequence
  Description of Artificial Sequence: Synthetic oligonucleotide
gggagauacauuggaucuu

SEQ ID NO: 638 - RNA, 19 nt, Artificial Sequence
  Description of Artificial Sequence: Synthetic oligonucleotide
ggagauacauuggaucuuc

SEQ ID NO: 639 - RNA, 19 nt, Artificial Sequence
  Description of Artificial Sequence: Synthetic oligonucleotide
gagauacauuggaucuucu

SEQ ID NO: 640 - RNA, 19 nt, Artificial Sequence
  Description of Artificial Sequence: Synthetic oligonucleotide
agauacauuggaucuucuc

SEQ ID NO: 641 - RNA, 19 nt, Artificial Sequence
  Description of Artificial Sequence: Synthetic oligonucleotide
gauacauuggaucuucuca

SEQ ID NO: 642 - RNA, 19 nt, Artificial Sequence
  Description of Artificial Sequence: Synthetic oligonucleotide
auacauuggaucuucucau

SEQ ID NO: 643 - RNA, 19 nt, Artificial Sequence
  Description of Artificial Sequence: Synthetic oligonucleotide
uacauuggaucuucucauu

SEQ ID NO: 644 - RNA, 19 nt, Artificial Sequence
  Description of Artificial Sequence: Synthetic oligonucleotide
acauuggaucuucucauug

SEQ ID NO: 645 - RNA, 19 nt, Artificial Sequence
  Description of Artificial Sequence: Synthetic oligonucleotide
cauuggaucuucucauugg

SEQ ID NO: 646 - RNA, 19 nt, Artificial Sequence
  Description of Artificial Sequence: Synthetic oligonucleotide
auuggaucuucucauugga

SEQ ID NO: 647 - RNA, 19 nt, Artificial Sequence
  Description of Artificial Sequence: Synthetic oligonucleotide
uuggaucuucucauuggag

SEQ ID NO: 648 - RNA, 19 nt, Artificial Sequence
  Description of Artificial Sequence: Synthetic oligonucleotide
uggaucuucucauuggaga

SEQ ID NO: 649 - RNA, 19 nt, Artificial Sequence
  Description of Artificial Sequence: Synthetic oligonucleotide
ggaucuucucauuggagag

SEQ ID NO: 650 - RNA, 19 nt, Artificial Sequence
  Description of Artificial Sequence: Synthetic oligonucleotide
gaucuucucauuggagagg

SEQ ID NO: 651 - RNA, 19 nt, Artificial Sequence
  Description of Artificial Sequence: Synthetic oligonucleotide
aucuucucauuggagagga

SEQ ID NO: 652 - RNA, 19 nt, Artificial Sequence
  Description of Artificial Sequence: Synthetic oligonucleotide
ucuucucauuggagaggau

SEQ ID NO: 653 - RNA, 19 nt, Artificial Sequence
  Description of Artificial Sequence: Synthetic oligonucleotide
cuucucauuggagaggaua

SEQ ID NO: 654 - RNA, 19 nt, Artificial Sequence
  Description of Artificial Sequence: Synthetic oligonucleotide
uucucauuggagaggauaa

SEQ ID NO: 655 - RNA, 19 nt, Artificial Sequence
  Description of Artificial Sequence: Synthetic oligonucleotide
ucucauuggagaggauaaa

SEQ ID NO: 656 - RNA, 19 nt, Artificial Sequence
  Description of Artificial Sequence: Synthetic oligonucleotide
cucauuggagaggauaaag

SEQ ID NO: 657 - RNA, 19 nt, Artificial Sequence
  Description of Artificial Sequence: Synthetic oligonucleotide
ucauuggagaggauaaaga

SEQ ID NO: 658 - RNA, 19 nt, Artificial Sequence
  Description of Artificial Sequence: Synthetic oligonucleotide
cauuggagaggauaaagaa

SEQ ID NO: 659 - RNA, 19 nt, Artificial Sequence
  Description of Artificial Sequence: Synthetic oligonucleotide
auuggagaggauaaagaag

SEQ ID NO: 660 - RNA, 19 nt, Artificial Sequence
  Description of Artificial Sequence: Synthetic oligonucleotide
uuggagaggauaaagaagc

SEQ ID NO: 661 - RNA, 19 nt, Artificial Sequence
  Description of Artificial Sequence: Synthetic oligonucleotide
uggagaggauaaagaagca

SEQ ID NO: 662 - RNA, 19 nt, Artificial Sequence
  Description of Artificial Sequence: Synthetic oligonucleotide
ggagaggauaaagaagcag

SEQ ID NO: 663 - RNA, 19 nt, Artificial Sequence
  Description of Artificial Sequence: Synthetic oligonucleotide
gagaggauaaagaagcagg

SEQ ID NO: 664 - RNA, 19 nt, Artificial Sequence
  Description of Artificial Sequence: Synthetic oligonucleotide
agaggauaaagaagcagga

SEQ ID NO: 665 - RNA, 19 nt, Artificial Sequence
  Description of Artificial Sequence: Synthetic oligonucleotide
gaggauaaagaagcaggaa

SEQ ID NO: 666 - RNA, 19 nt, Artificial Sequence
  Description of Artificial Sequence: Synthetic oligonucleotide
aggauaaagaagcaggaac

SEQ ID NO: 667 - RNA, 19 nt, Artificial Sequence
  Description of Artificial Sequence: Synthetic oligonucleotide
ggauaaagaagcaggaaca

SEQ ID NO: 668 - RNA, 19 nt, Artificial Sequence
  Description of Artificial Sequence: Synthetic oligonucleotide
gauaaagaagcaggaacag

SEQ ID NO: 669 - RNA, 19 nt, Artificial Sequence
  Description of Artificial Sequence: Synthetic oligonucleotide
auaaagaagcaggaacaga

SEQ ID NO: 670 - RNA, 19 nt, Artificial Sequence
  Description of Artificial Sequence: Synthetic oligonucleotide
uaaagaagcaggaacagag

SEQ ID NO: 671 - RNA, 19 nt, Artificial Sequence
  Description of Artificial Sequence: Synthetic oligonucleotide
aaagaagcaggaacagaga

SEQ ID NO: 672 - RNA, 19 nt, Artificial Sequence
  Description of Artificial Sequence: Synthetic oligonucleotide
aagaagcaggaacagagac

SEQ ID NO: 673 - RNA, 19 nt, Artificial Sequence
  Description of Artificial Sequence: Synthetic oligonucleotide
agaagcaggaacagagaca

SEQ ID NO: 674 - RNA, 19 nt, Artificial Sequence
  Description of Artificial Sequence: Synthetic oligonucleotide
gaagcaggaacagagacag

SEQ ID NO: 675 - RNA, 19 nt, Artificial Sequence
  Description of Artificial Sequence: Synthetic oligonucleotide
aagcaggaacagagacagu

SEQ ID NO: 676 - RNA, 19 nt, Artificial Sequence
  Description of Artificial Sequence: Synthetic oligonucleotide
agcaggaacagagacaguu

SEQ ID NO: 677 - RNA, 19 nt, Artificial Sequence
  Description of Artificial Sequence: Synthetic oligonucleotide
gcaggaacagagacaguua

SEQ ID NO: 678 - RNA, 19 nt, Artificial Sequence
  Description of Artificial Sequence: Synthetic oligonucleotide
caggaacagagacaguuau

SEQ ID NO: 679 - RNA, 19 nt, Artificial Sequence
  Description of Artificial Sequence: Synthetic oligonucleotide
aggaacagagacaguuaug

SEQ ID NO: 680 - RNA, 19 nt, Artificial Sequence
  Description of Artificial Sequence: Synthetic oligonucleotide
ggaacagagacaguuaugc

SEQ ID NO: 681 - RNA, 19 nt, Artificial Sequence
  Description of Artificial Sequence: Synthetic oligonucleotide
gaacagagacaguuaugcg

SEQ ID NO: 682 - RNA, 19 nt, Artificial Sequence
  Description of Artificial Sequence: Synthetic oligonucleotide
aacagagacaguuaugcgg

SEQ ID NO: 683 - RNA, 19 nt, Artificial Sequence
  Description of Artificial Sequence: Synthetic oligonucleotide
acagagacaguuaugcgga

SEQ ID NO: 684 - RNA, 19 nt, Artificial Sequence
  Description of Artificial Sequence: Synthetic oligonucleotide
cagagacaguuaugcggau

SEQ ID NO: 685 - RNA, 19 nt, Artificial Sequence
  Description of Artificial Sequence: Synthetic oligonucleotide
agagacaguuaugcggauu

SEQ ID NO: 686 - RNA, 19 nt, Artificial Sequence
  Description of Artificial Sequence: Synthetic oligonucleotide
gagacaguuaugcggauuc

SEQ ID NO: 687 - RNA, 19 nt, Artificial Sequence
  Description of Artificial Sequence: Synthetic oligonucleotide
agacaguuaugcggauucu

SEQ ID NO: 688 - RNA, 19 nt, Artificial Sequence
  Description of Artificial Sequence: Synthetic oligonucleotide
gacaguuaugcggauucuc

SEQ ID NO: 689 - RNA, 19 nt, Artificial Sequence
  Description of Artificial Sequence: Synthetic oligonucleotide
acaguuaugcggauucucu

SEQ ID NO: 690 - RNA, 19 nt, Artificial Sequence
  Description of Artificial Sequence: Synthetic oligonucleotide
caguuaugcggauucucuu

SEQ ID NO: 691 - RNA, 19 nt, Artificial Sequence
  Description of Artificial Sequence: Synthetic oligonucleotide
aguuaugcggauucucuug

SEQ ID NO: 692 - RNA, 19 nt, Artificial Sequence
  Description of Artificial Sequence: Synthetic oligonucleotide
guuaugcggauucucuuga

SEQ ID NO: 693 - RNA, 19 nt, Artificial Sequence
  Description of Artificial Sequence: Synthetic oligonucleotide
uuaugcggauucucuugaa

SEQ ID NO: 694 - RNA, 19 nt, Artificial Sequence
  Description of Artificial Sequence: Synthetic oligonucleotide
uaugcggauucucuugaaa

SEQ ID NO: 695 - RNA, 19 nt, Artificial Sequence
  Description of Artificial Sequence: Synthetic oligonucleotide
augcggauucucuugaaaa

SEQ ID NO: 696 - RNA, 19 nt, Artificial Sequence
  Description of Artificial Sequence: Synthetic oligonucleotide
ugcggauucucuugaaaaa

SEQ ID NO: 697 - RNA, 19 nt, Artificial Sequence
  Description of Artificial Sequence: Synthetic oligonucleotide
gcggauucucuugaaaaaa

SEQ ID NO: 698 - RNA, 19 nt, Artificial Sequence
  Description of Artificial Sequence: Synthetic oligonucleotide
cggauucucuugaaaaaag

SEQ ID NO: 699 - RNA, 19 nt, Artificial Sequence
  Description of Artificial Sequence: Synthetic oligonucleotide
ggauucucuugaaaaaagu

SEQ ID NO: 700 - RNA, 19 nt, Artificial Sequence
  Description of Artificial Sequence: Synthetic oligonucleotide
gauucucuugaaaaaagug

SEQ ID NO: 701 - RNA, 19 nt, Artificial Sequence
  Description of Artificial Sequence: Synthetic oligonucleotide
auucucuugaaaaaagugu

SEQ ID NO: 702 - RNA, 19 nt, Artificial Sequence
  Description of Artificial Sequence: Synthetic oligonucleotide
uucucuugaaaaaaguguu

SEQ ID NO: 703 - RNA, 19 nt, Artificial Sequence
  Description of Artificial Sequence: Synthetic oligonucleotide
ucucuugaaaaaaguguuu

SEQ ID NO: 704 - RNA, 19 nt, Artificial Sequence
  Description of Artificial Sequence: Synthetic oligonucleotide
cucuugaaaaaaguguuug

SEQ ID NO: 705 - RNA, 19 nt, Artificial Sequence
  Description of Artificial Sequence: Synthetic oligonucleotide
ucuugaaaaaaguguuuga

SEQ ID NO: 706 - RNA, 19 nt, Artificial Sequence
  Description of Artificial Sequence: Synthetic oligonucleotide
cuugaaaaaaguguuugaa

SEQ ID NO: 707 - RNA, 19 nt, Artificial Sequence
  Description of Artificial Sequence: Synthetic oligonucleotide
uugaaaaaaguguuugaag

SEQ ID NO: 708 - RNA, 19 nt, Artificial Sequence
  Description of Artificial Sequence: Synthetic oligonucleotide
ugaaaaaaguguuugaaga

SEQ ID NO: 709 - RNA, 19 nt, Artificial Sequence
  Description of Artificial Sequence: Synthetic oligonucleotide
gaaaaaaguguuugaagag

SEQ ID NO: 710 - RNA, 19 nt, Artificial Sequence
  Description of Artificial Sequence: Synthetic oligonucleotide
aaaaaaguguuugaagaga

SEQ ID NO: 711 - RNA, 19 nt, Artificial Sequence
  Description of Artificial Sequence: Synthetic oligonucleotide
aaaaaguguuugaagagaa

SEQ ID NO: 712 - RNA, 19 nt, Artificial Sequence
  Description of Artificial Sequence: Synthetic oligonucleotide
aaaaguguuugaagagaag

SEQ ID NO: 713 - RNA, 19 nt, Artificial Sequence
  Description of Artificial Sequence: Synthetic oligonucleotide
aaaguguuugaagagaaga

SEQ ID NO: 714 - RNA, 19 nt, Artificial Sequence
  Description of Artificial Sequence: Synthetic oligonucleotide
aaguguuugaagagaagac

SEQ ID NO: 715 - RNA, 19 nt, Artificial Sequence
  Description of Artificial Sequence: Synthetic oligonucleotide
aguguuugaagagaagacu

SEQ ID NO: 716 - RNA, 19 nt, Artificial Sequence
  Description of Artificial Sequence: Synthetic oligonucleotide
guguuugaagagaagacug

SEQ ID NO: 717 - RNA, 19 nt, Artificial Sequence
  Description of Artificial Sequence: Synthetic oligonucleotide
uguuugaagagaagacuga

SEQ ID NO: 718 - RNA, 19 nt, Artificial Sequence
  Description of Artificial Sequence: Synthetic oligonucleotide
guuugaagagaagacugaa

SEQ ID NO: 719 - RNA, 19 nt, Artificial Sequence
  Description of Artificial Sequence: Synthetic oligonucleotide
uuugaagagaagacugaaa

SEQ ID NO: 720 - RNA, 19 nt, Artificial Sequence
  Description of Artificial Sequence: Synthetic oligonucleotide
uugaagagaagacugaaag

SEQ ID NO: 721 - RNA, 19 nt, Artificial Sequence
  Description of Artificial Sequence: Synthetic oligonucleotide
ugaagagaagacugaaagu

SEQ ID NO: 722 - RNA, 19 nt, Artificial Sequence
  Description of Artificial Sequence: Synthetic oligonucleotide
gaagagaagacugaaagug

SEQ ID NO: 723 - RNA, 19 nt, Artificial Sequence
  Description of Artificial Sequence: Synthetic oligonucleotide
aagagaagacugaaaguga

SEQ ID NO: 724 - RNA, 19 nt, Artificial Sequence
  Description of Artificial Sequence: Synthetic oligonucleotide
agagaagacugaaagugaa

SEQ ID NO: 725 - RNA, 19 nt, Artificial Sequence
  Description of Artificial Sequence: Synthetic oligonucleotide
gagaagacugaaagugaaa

SEQ ID NO: 726 - RNA, 19 nt, Artificial Sequence
  Description of Artificial Sequence: Synthetic oligonucleotide
agaagacugaaagugaaaa

SEQ ID NO: 727 - RNA, 19 nt, Artificial Sequence
  Description of Artificial Sequence: Synthetic oligonucleotide
gaagacugaaagugaaaaa

SEQ ID NO: 728 - RNA, 19 nt, Artificial Sequence
  Description of Artificial Sequence: Synthetic oligonucleotide
aagacugaaagugaaaaau

SEQ ID NO: 729 - RNA, 19 nt, Artificial Sequence
  Description of Artificial Sequence: Synthetic oligonucleotide
agacugaaagugaaaaaua

SEQ ID NO: 730 - RNA, 19 nt, Artificial Sequence
  Description of Artificial Sequence: Synthetic oligonucleotide
gacugaaagugaaaaauac

SEQ ID NO: 731 - RNA, 19 nt, Artificial Sequence
  Description of Artificial Sequence: Synthetic oligonucleotide
acugaaagugaaaaauaca

SEQ ID NO: 732 - RNA, 19 nt, Artificial Sequence
  Description of Artificial Sequence: Synthetic oligonucleotide
cugaaagugaaaaauacag

SEQ ID NO: 733 - RNA, 19 nt, Artificial Sequence
  Description of Artificial Sequence: Synthetic oligonucleotide
ugaaagugaaaaauacaga

SEQ ID NO: 734 - RNA, 19 nt, Artificial Sequence
  Description of Artificial Sequence: Synthetic oligonucleotide
gaaagugaaaaauacagag

SEQ ID NO: 735 - RNA, 19 nt, Artificial Sequence
  Description of Artificial Sequence: Synthetic oligonucleotide
aaagugaaaaauacagagu

SEQ ID NO: 736 - RNA, 19 nt, Artificial Sequence
  Description of Artificial Sequence: Synthetic oligonucleotide
aagugaaaaauacagagug

SEQ ID NO: 737 - RNA, 19 nt, Artificial Sequence
  Description of Artificial Sequence: Synthetic oligonucleotide
agugaaaaauacagagugg

SEQ ID NO: 738 - RNA, 19 nt, Artificial Sequence
  Description of Artificial Sequence: Synthetic oligonucleotide
gugaaaaauacagaguggu

SEQ ID NO: 739 - RNA, 19 nt, Artificial Sequence
  Description of Artificial Sequence: Synthetic oligonucleotide
ugaaaaauacagaguggug

SEQ ID NO: 740 - RNA, 19 nt, Artificial Sequence
  Description of Artificial Sequence: Synthetic oligonucleotide
gaaaaauacagaguggugu

SEQ ID NO: 741 - RNA, 19 nt, Artificial Sequence
  Description of Artificial Sequence: Synthetic oligonucleotide
aaaaauacagagugguguu

SEQ ID NO: 742 - RNA, 19 nt, Artificial Sequence
  Description of Artificial Sequence: Synthetic oligonucleotide
aaaauacagagugguguua

SEQ ID NO: 743 - RNA, 19 nt, Artificial Sequence
  Description of Artificial Sequence: Synthetic oligonucleotide
aaauacagagugguguuac

SEQ ID NO: 744 - RNA, 19 nt, Artificial Sequence
  Description of Artificial Sequence: Synthetic oligonucleotide
aauacagagugguguuacg

SEQ ID NO: 745 - RNA, 19 nt, Artificial Sequence
  Description of Artificial Sequence: Synthetic oligonucleotide
auacagagugguguuacgg

SEQ ID NO: 746 - RNA, 19 nt, Artificial Sequence
  Description of Artificial Sequence: Synthetic oligonucleotide
uacagagugguguuacggc

SEQ ID NO: 747 - RNA, 19 nt, Artificial Sequence
  Description of Artificial Sequence: Synthetic oligonucleotide
acagagugguguuacggcg

SEQ ID NO: 748 - RNA, 19 nt, Artificial Sequence
  Description of Artificial Sequence: Synthetic oligonucleotide
cagagugguguuacggcgg

SEQ ID NO: 749 - RNA, 19 nt, Artificial Sequence
  Description of Artificial Sequence: Synthetic oligonucleotide
agagugguguuacggcggu

SEQ ID NO: 750 - RNA, 19 nt, Artificial Sequence
  Description of Artificial Sequence: Synthetic oligonucleotide
gagugguguuacggcggug

SEQ ID NO: 751 - RNA, 19 nt, Artificial Sequence
  Description of Artificial Sequence: Synthetic oligonucleotide
agugguguuacggcggugg

SEQ ID NO: 752 - RNA, 19 nt, Artificial Sequence
  Description of Artificial Sequence: Synthetic oligonucleotide
gugguguuacggcggugga

SEQ ID NO: 753 - RNA, 19 nt, Artificial Sequence
  Description of Artificial Sequence: Synthetic oligonucleotide
ugguguuacggcgguggaa

SEQ ID NO: 754 - RNA, 19 nt, Artificial Sequence
  Description of Artificial Sequence: Synthetic oligonucleotide
gguguuacggcgguggaaa

SEQ ID NO: 755 - RNA, 19 nt, Artificial Sequence
  Description of Artificial Sequence: Synthetic oligonucleotide
guguuacggcgguggaaaa

SEQ ID NO: 756 - RNA, 19 nt, Artificial Sequence
  Description of Artificial Sequence: Synthetic oligonucleotide
uguuacggcgguggaaaag

SEQ ID NO: 757 - RNA, 19 nt, Artificial Sequence
  Description of Artificial Sequence: Synthetic oligonucleotide
guuacggcgguggaaaagu

SEQ ID NO: 758 - RNA, 19 nt, Artificial Sequence
  Description of Artificial Sequence: Synthetic oligonucleotide
uuacggcgguggaaaaguu

SEQ ID NO: 759 - RNA, 19 nt, Artificial Sequence
  Description of Artificial Sequence: Synthetic oligonucleotide
uacggcgguggaaaaguuu

SEQ ID NO: 760 - RNA, 19 nt, Artificial Sequence
  Description of Artificial Sequence: Synthetic oligonucleotide
acggcgguggaaaaguuua

SEQ ID NO: 761 - RNA, 19 nt, Artificial Sequence
  Description of Artificial Sequence: Synthetic oligonucleotide
cggcgguggaaaaguuuaa

SEQ ID NO: 762 - RNA, 19 nt, Artificial Sequence
  Description of Artificial Sequence: Synthetic oligonucleotide
ggcgguggaaaaguuuaaa

SEQ ID NO: 763 - RNA, 19 nt, Artificial Sequence
  Description of Artificial Sequence: Synthetic oligonucleotide
gcgguggaaaaguuuaaag

SEQ ID NO: 764 - RNA, 19 nt, Artificial Sequence
  Description of Artificial Sequence: Synthetic oligonucleotide
cgguggaaaaguuuaaagu

SEQ ID NO: 765 - RNA, 19 nt, Artificial Sequence
  Description of Artificial Sequence: Synthetic oligonucleotide
gguggaaaaguuuaaaguu

SEQ ID NO: 766 - RNA, 19 nt, Artificial Sequence
  Description of Artificial Sequence: Synthetic oligonucleotide
guggaaaaguuuaaaguug

SEQ ID NO: 767 - RNA, 19 nt, Artificial Sequence
  Description of Artificial Sequence: Synthetic oligonucleotide
uggaaaaguuuaaaguugc

SEQ ID NO: 768 - RNA, 19 nt, Artificial Sequence
  Description of Artificial Sequence: Synthetic oligonucleotide
ggaaaaguuuaaaguugcc

SEQ ID NO: 769 - RNA, 19 nt, Artificial Sequence
  Description of Artificial Sequence: Synthetic oligonucleotide
gaaaaguuuaaaguugccu

SEQ ID NO: 770 - RNA, 19 nt, Artificial Sequence
  Description of Artificial Sequence: Synthetic oligonucleotide
aaaaguuuaaaguugccua

SEQ ID NO: 771 - RNA, 19 nt, Artificial Sequence
  Description of Artificial Sequence: Synthetic oligonucleotide
aaaguuuaaaguugccuaa

SEQ ID NO: 772 - RNA, 19 nt, Artificial Sequence
  Description of Artificial Sequence: Synthetic oligonucleotide
aaguuuaaaguugccuaag

SEQ ID NO: 773 - RNA, 19 nt, Artificial Sequence
  Description of Artificial Sequence: Synthetic oligonucleotide
aguuuaaaguugccuaaga

SEQ ID NO: 774 - RNA, 19 nt, Artificial Sequence
  Description of Artificial Sequence: Synthetic oligonucleotide
guuuaaaguugccuaagaa

SEQ ID NO: 775 - RNA, 19 nt, Artificial Sequence
  Description of Artificial Sequence: Synthetic oligonucleotide
uuuaaaguugccuaagaag

SEQ ID NO: 776 - RNA, 19 nt, Artificial Sequence
  Description of Artificial Sequence: Synthetic oligonucleotide
uuaaaguugccuaagaaga

SEQ ID NO: 777 - RNA, 19 nt, Artificial Sequence
  Description of Artificial Sequence: Synthetic oligonucleotide
uaaaguugccuaagaagag

SEQ ID NO: 778 - RNA, 19 nt, Artificial Sequence
  Description of Artificial Sequence: Synthetic oligonucleotide
aaaguugccuaagaagaga

SEQ ID NO: 779 - RNA, 19 nt, Artificial Sequence
  Description of Artificial Sequence: Synthetic oligonucleotide
aaguugccuaagaagagaa

SEQ ID NO: 780 - RNA, 19 nt, Artificial Sequence
  Description of Artificial Sequence: Synthetic oligonucleotide
aguugccuaagaagagaau

SEQ ID NO: 781 - RNA, 19 nt, Artificial Sequence
  Description of Artificial Sequence: Synthetic oligonucleotide
guugccuaagaagagaaug

SEQ ID NO: 782 - RNA, 19 nt, Artificial Sequence
  Description of Artificial Sequence: Synthetic oligonucleotide
uugccuaagaagagaaugu

SEQ ID NO: 783 - RNA, 19 nt, Artificial Sequence
  Description of Artificial Sequence: Synthetic oligonucleotide
ugccuaagaagagaauguc

SEQ ID NO: 784 - RNA, 19 nt, Artificial Sequence
  Description of Artificial Sequence: Synthetic oligonucleotide
gccuaagaagagaaugucu

SEQ ID NO: 785 - RNA, 19 nt, Artificial Sequence
  Description of Artificial Sequence: Synthetic oligonucleotide
ccuaagaagagaaugucua

SEQ ID NO: 786 - RNA, 19 nt, Artificial Sequence
  Description of Artificial Sequence: Synthetic oligonucleotide
cuaagaagagaaugucuaa

SEQ ID NO: 787 - RNA, 19 nt, Artificial Sequence
  Description of Artificial Sequence: Synthetic oligonucleotide
uaagaagagaaugucuaaa

SEQ ID NO: 788 - RNA, 19 nt, Artificial Sequence
  Description of Artificial Sequence: Synthetic oligonucleotide
aagaagagaaugucuaaau

SEQ ID NO: 789 - RNA, 19 nt, Artificial Sequence
  Description of Artificial Sequence: Synthetic oligonucleotide
agaagagaaugucuaaaua

SEQ ID NO: 790 - RNA, 19 nt, Artificial Sequence
  Description of Artificial Sequence: Synthetic oligonucleotide
gaagagaaugucuaaauaa

SEQ ID NO: 791 - RNA, 19 nt, Artificial Sequence
  Description of Artificial Sequence: Synthetic oligonucleotide
aagagaaugucuaaauaaa

SEQ ID NO: 792 - RNA, 19 nt, Artificial Sequence
  Description of Artificial Sequence: Synthetic oligonucleotide
agagaaugucuaaauaaau

SEQ ID NO: 793 - RNA, 19 nt, Artificial Sequence
  Description of Artificial Sequence: Synthetic oligonucleotide
gagaaugucuaaauaaaug

SEQ ID NO: 794 - RNA, 19 nt, Artificial Sequence
  Description of Artificial Sequence: Synthetic oligonucleotide
agaaugucuaaauaaaugg

SEQ ID NO: 795 - RNA, 19 nt, Artificial Sequence
  Description of Artificial Sequence: Synthetic oligonucleotide
gaaugucuaaauaaaugga

SEQ ID NO: 796 - RNA, 19 nt, Artificial Sequence
  Description of Artificial Sequence: Synthetic oligonucleotide
aaugucuaaauaaauggau

SEQ ID NO: 797 - RNA, 19 nt, Artificial Sequence
  Description of Artificial Sequence: Synthetic oligonucleotide
augucuaaauaaauggauu

SEQ ID NO: 798 - RNA, 19 nt, Artificial Sequence
  Description of Artificial Sequence: Synthetic oligonucleotide
ugucuaaauaaauggauug

SEQ ID NO: 799 - RNA, 19 nt, Artificial Sequence
  Description of Artificial Sequence: Synthetic oligonucleotide
gucuaaauaaauggauugc

SEQ ID NO: 800 - RNA, 19 nt, Artificial Sequence
  Description of Artificial Sequence: Synthetic oligonucleotide
ucuaaauaaauggauugcu

SEQ ID NO: 801 - RNA, 19 nt, Artificial Sequence
  Description of Artificial Sequence: Synthetic oligonucleotide
cuaaauaaauggauugcuu

SEQ ID NO: 802 - RNA, 19 nt, Artificial Sequence
  Description of Artificial Sequence: Synthetic oligonucleotide
uaaauaaauggauugcuuu

SEQ ID NO: 803 - RNA, 19 nt, Artificial Sequence
  Description of Artificial Sequence: Synthetic oligonucleotide
aaauaaauggauugcuuuu

SEQ ID NO: 804 - RNA, 19 nt, Artificial Sequence
  Description of Artificial Sequence: Synthetic oligonucleotide
aauaaauggauugcuuuuu

SEQ ID NO: 805 - RNA, 19 nt, Artificial Sequence
  Description of Artificial Sequence: Synthetic oligonucleotide
auaaauggauugcuuuuua

SEQ ID NO: 806 - RNA, 19 nt, Artificial Sequence
  Description of Artificial Sequence: Synthetic oligonucleotide
uaaauggauugcuuuuuag

SEQ ID NO: 807 - RNA, 19 nt, Artificial Sequence
  Description of Artificial Sequence: Synthetic oligonucleotide
aaauggauugcuuuuuagc

SEQ ID NO: 808 - RNA, 19 nt, Artificial Sequence
  Description of Artificial Sequence: Synthetic oligonucleotide
aauggauugcuuuuuagca

SEQ ID NO: 809 - RNA, 19 nt, Artificial Sequence
  Description of Artificial Sequence: Synthetic oligonucleotide
auggauugcuuuuuagcaa

SEQ ID NO: 810 - RNA, 19 nt, Artificial Sequence
  Description of Artificial Sequence: Synthetic oligonucleotide
uggauugcuuuuuagcaau

SEQ ID NO: 811 - RNA, 19 nt, Artificial Sequence
  Description of Artificial Sequence: Synthetic oligonucleotide
ggauugcuuuuuagcaaua

SEQ ID NO: 812 - RNA, 19 nt, Artificial Sequence
  Description of Artificial Sequence: Synthetic oligonucleotide
gauugcuuuuuagcaauag

SEQ ID NO: 813 - RNA, 19 nt, Artificial Sequence
  Description of Artificial Sequence: Synthetic oligonucleotide
auugcuuuuuagcaauaga

SEQ ID NO: 814 - RNA, 19 nt, Artificial Sequence
  Description of Artificial Sequence: Synthetic oligonucleotide
uugcuuuuuagcaauagag

SEQ ID NO: 815 - RNA, 19 nt, Artificial Sequence
  Description of Artificial Sequence: Synthetic oligonucleotide
ugcuuuuuagcaauagagc

SEQ ID NO: 816 - RNA, 19 nt, Artificial Sequence
  Description of Artificial Sequence: Synthetic oligonucleotide
gcuuuuuagcaauagagcu

SEQ ID NO: 817 - RNA, 19 nt, Artificial Sequence
  Description of Artificial Sequence: Synthetic oligonucleotide
cuuuuuagcaauagagcug

SEQ ID NO: 818 - RNA, 19 nt, Artificial Sequence
  Description of Artificial Sequence: Synthetic oligonucleotide
uuuuuagcaauagagcugc

SEQ ID NO: 819 - RNA, 19 nt, Artificial Sequence
  Description of Artificial Sequence: Synthetic oligonucleotide
uuuuagcaauagagcugcu

SEQ ID NO: 820 - RNA, 19 nt, Artificial Sequence
  Description of Artificial Sequence: Synthetic oligonucleotide
uuuagcaauagagcugcuu

SEQ ID NO: 821 - RNA, 19 nt, Artificial Sequence
  Description of Artificial Sequence: Synthetic oligonucleotide
uuagcaauagagcugcuuu

SEQ ID NO: 822 - RNA, 19 nt, Artificial Sequence
  Description of Artificial Sequence: Synthetic oligonucleotide
uagcaauagagcugcuuuc

SEQ ID NO: 823 - RNA, 19 nt, Artificial Sequence
  Description of Artificial Sequence: Synthetic oligonucleotide
agcaauagagcugcuuucu

SEQ ID NO: 824 - RNA, 19 nt, Artificial Sequence
  Description of Artificial Sequence: Synthetic oligonucleotide
gcaauagagcugcuuucua

SEQ ID NO: 825 - RNA, 19 nt, Artificial Sequence
  Description of Artificial Sequence: Synthetic oligonucleotide
caauagagcugcuuucuag

SEQ ID NO: 826 - RNA, 19 nt, Artificial Sequence
  Description of Artificial Sequence: Synthetic oligonucleotide
aauagagcugcuuucuagu

SEQ ID NO: 827 - RNA, 19 nt, Artificial Sequence
  Description of Artificial Sequence: Synthetic oligonucleotide
auagagcugcuuucuagug

SEQ ID NO: 828 - RNA, 19 nt, Artificial Sequence
  Description of Artificial Sequence: Synthetic oligonucleotide
uagagcugcuuucuagugg

SEQ ID NO: 829 - RNA, 19 nt, Artificial Sequence
  Description of Artificial Sequence: Synthetic oligonucleotide
agagcugcuuucuaguggu

SEQ ID NO: 830 - RNA, 19 nt, Artificial Sequence
  Description of Artificial Sequence: Synthetic oligonucleotide
gagcugcuuucuaguggua

SEQ ID NO: 831 - RNA, 19 nt, Artificial Sequence
  Description of Artificial Sequence: Synthetic oligonucleotide
agcugcuuucuagugguaa

SEQ ID NO: 832 - RNA, 19 nt, Artificial Sequence
  Description of Artificial Sequence: Synthetic oligonucleotide
gcugcuuucuagugguaaa

SEQ ID NO: 833 - RNA, 19 nt, Artificial Sequence
  Description of Artificial Sequence: Synthetic oligonucleotide
cugcuuucuagugguaaag

SEQ ID NO: 834 - RNA, 19 nt, Artificial Sequence
  Description of Artificial Sequence: Synthetic oligonucleotide
ugcuuucuagugguaaagg

SEQ ID NO: 835 - RNA, 19 nt, Artificial Sequence
  Description of Artificial Sequence: Synthetic oligonucleotide
gcuuucuagugguaaagga

SEQ ID NO: 836 - RNA, 19 nt, Artificial Sequence
  Description of Artificial Sequence: Synthetic oligonucleotide
cuuucuagugguaaaggaa

SEQ ID NO: 837 - RNA, 19 nt, Artificial Sequence
  Description of Artificial Sequence: Synthetic oligonucleotide
uuucuagugguaaaggaag

SEQ ID NO: 838 - RNA, 19 nt, Artificial Sequence
  Description of Artificial Sequence: Synthetic oligonucleotide
uucuagugguaaaggaagg

SEQ ID NO: 839 - RNA, 19 nt, Artificial Sequence
  Description of Artificial Sequence: Synthetic oligonucleotide
ucuagugguaaaggaaggg

SEQ ID NO: 840 - RNA, 19 nt, Artificial Sequence
  Description of Artificial Sequence: Synthetic oligonucleotide
cuagugguaaaggaagggg

SEQ ID NO: 841 - RNA, 19 nt, Artificial Sequence
  Description of Artificial Sequence: Synthetic oligonucleotide
uagugguaaaggaaggggu

SEQ ID NO: 842 - RNA, 19 nt, Artificial Sequence
  Description of Artificial Sequence: Synthetic oligonucleotide
agugguaaaggaagggguc

SEQ ID NO: 843 - RNA, 19 nt, Artificial Sequence
  Description of Artificial Sequence: Synthetic oligonucleotide
gugguaaaggaagggguca

SEQ ID NO: 844 - RNA, 19 nt, Artificial Sequence
  Description of Artificial Sequence: Synthetic oligonucleotide
ugguaaaggaaggggucac

SEQ ID NO: 845 - RNA, 19 nt, Artificial Sequence
  Description of Artificial Sequence: Synthetic oligonucleotide
gguaaaggaaggggucacc

SEQ ID NO: 846 - RNA, 19 nt, Artificial Sequence
  Description of Artificial Sequence: Synthetic oligonucleotide
guaaaggaaggggucaccu

SEQ ID NO: 847 - RNA, 19 nt, Artificial Sequence
  Description of Artificial Sequence: Synthetic oligonucleotide
uaaaggaaggggucaccug

SEQ ID NO: 848 - RNA, 19 nt, Artificial Sequence
  Description of Artificial Sequence: Synthetic oligonucleotide
aaaggaaggggucaccuga

SEQ ID NO: 849 - RNA, 19 nt, Artificial Sequence
  Description of Artificial Sequence: Synthetic oligonucleotide
aaggaaggggucaccugaa

SEQ ID NO: 850 - RNA, 19 nt, Artificial Sequence
  Description of Artificial Sequence: Synthetic oligonucleotide
aggaaggggucaccugaaa

SEQ ID NO: 851 - RNA, 19 nt, Artificial Sequence
  Description of Artificial Sequence: Synthetic oligonucleotide
ggaaggggucaccugaaaa

SEQ ID NO: 852 - RNA, 19 nt, Artificial Sequence
  Description of Artificial Sequence: Synthetic oligonucleotide
gaaggggucaccugaaaaa

SEQ ID NO: 853 - RNA, 19 nt, Artificial Sequence
  Description of Artificial Sequence: Synthetic oligonucleotide
aaggggucaccugaaaaau

SEQ ID NO: 854 - RNA, 19 nt, Artificial Sequence
  Description of Artificial Sequence: Synthetic oligonucleotide
aggggucaccugaaaaaua

SEQ ID NO: 855 - RNA, 19 nt, Artificial Sequence
  Description of Artificial Sequence: Synthetic oligonucleotide
ggggucaccugaaaaauag

SEQ ID NO: 856 - RNA, 19 nt, Artificial Sequence
  Description of Artificial Sequence: Synthetic oligonucleotide
gggucaccugaaaaauagg

SEQ ID NO: 857 - RNA, 19 nt, Artificial Sequence
  Description of Artificial Sequence: Synthetic oligonucleotide
ggucaccugaaaaauagga

SEQ ID NO: 858 - RNA, 19 nt, Artificial Sequence
  Description of Artificial Sequence: Synthetic oligonucleotide
gucaccugaaaaauaggac

SEQ ID NO: 859 - RNA, 19 nt, Artificial Sequence
  Description of Artificial Sequence: Synthetic oligonucleotide
ucaccugaaaaauaggaca

SEQ ID NO: 860 - RNA, 19 nt, Artificial Sequence
  Description of Artificial Sequence: Synthetic oligonucleotide
caccugaaaaauaggacau

SEQ ID NO: 861 - RNA, 19 nt, Artificial Sequence
  Description of Artificial Sequence: Synthetic oligonucleotide
accugaaaaauaggacauu

SEQ ID NO: 862 - RNA, 19 nt, Artificial Sequence
  Description of Artificial Sequence: Synthetic oligonucleotide
ccugaaaaauaggacauuu

SEQ ID NO: 863 - RNA, 19 nt, Artificial Sequence
  Description of Artificial Sequence: Synthetic oligonucleotide
cugaaaaauaggacauuuu

SEQ ID NO: 864 - RNA, 19 nt, Artificial Sequence
  Description of Artificial Sequence: Synthetic oligonucleotide
ugaaaaauaggacauuuuu

SEQ ID NO: 865 - RNA, 19 nt, Artificial Sequence
  Description of Artificial Sequence: Synthetic oligonucleotide
gaaaaauaggacauuuuua

SEQ ID NO: 866 - RNA, 19 nt, Artificial Sequence
  Description of Artificial Sequence: Synthetic oligonucleotide
aaaaauaggacauuuuuau

SEQ ID NO: 867 - RNA, 19 nt, Artificial Sequence
  Description of Artificial Sequence: Synthetic oligonucleotide
aaaauaggacauuuuuauu

SEQ ID NO: 868 - RNA, 19 nt, Artificial Sequence
  Description of Artificial Sequence: Synthetic oligonucleotide
aaauaggacauuuuuauua

SEQ ID NO: 869 - RNA, 19 nt, Artificial Sequence
  Description of Artificial Sequence: Synthetic oligonucleotide
aauaggacauuuuuauuaa

SEQ ID NO: 870 - RNA, 19 nt, Artificial Sequence
  Description of Artificial Sequence: Synthetic oligonucleotide
auaggacauuuuuauuaaa

SEQ ID NO: 871 - RNA, 19 nt, Artificial Sequence
  Description of Artificial Sequence: Synthetic oligonucleotide
uaggacauuuuuauuaaaa

SEQ ID NO: 872 - RNA, 19 nt, Artificial Sequence
  Description of Artificial Sequence: Synthetic oligonucleotide
aggacauuuuuauuaaaau

SEQ ID NO: 873 - RNA, 19 nt, Artificial Sequence
  Description of Artificial Sequence: Synthetic oligonucleotide
ggacauuuuuauuaaaaua

SEQ ID NO: 874 - RNA, 19 nt, Artificial Sequence
  Description of Artificial Sequence: Synthetic oligonucleotide
gacauuuuuauuaaaauaa

SEQ ID NO: 875 - RNA, 19 nt, Artificial Sequence
  Description of Artificial Sequence: Synthetic oligonucleotide
acauuuuuauuaaaauaaa

SEQ ID NO: 876 - RNA, 19 nt, Artificial Sequence
  Description of Artificial Sequence: Synthetic oligonucleotide
cauuuuuauuaaaauaaag

SEQ ID NO: 877 - RNA, 19 nt, Artificial Sequence
  Description of Artificial Sequence: Synthetic oligonucleotide
auuuuuauuaaaauaaagu

SEQ ID NO: 878 - RNA, 19 nt, Artificial Sequence
  Description of Artificial Sequence: Synthetic oligonucleotide
uuuuuauuaaaauaaaguu

SEQ ID NO: 879 - RNA, 19 nt, Artificial Sequence
  Description of Artificial Sequence: Synthetic oligonucleotide
uuuuauuaaaauaaaguuc

SEQ ID NO: 880 - RNA, 19 nt, Artificial Sequence
  Description of Artificial Sequence: Synthetic oligonucleotide
uuuauuaaaauaaaguucu

SEQ ID NO: 881 - RNA, 19 nt, Artificial Sequence
  Description of Artificial Sequence: Synthetic oligonucleotide
uuauuaaaauaaaguucuc

SEQ ID NO: 882 - RNA, 19 nt, Artificial Sequence
  Description of Artificial Sequence: Synthetic oligonucleotide
uauuaaaauaaaguucucu

SEQ ID NO: 883 - RNA, 19 nt, Artificial Sequence
  Description of Artificial Sequence: Synthetic oligonucleotide
auuaaaauaaaguucucuu

SEQ ID NO: 884 - RNA, 19 nt, Artificial Sequence
  Description of Artificial Sequence: Synthetic oligonucleotide
uuaaaauaaaguucucuua

SEQ ID NO: 885 - RNA, 19 nt, Artificial Sequence
  Description of Artificial Sequence: Synthetic oligonucleotide
uaaaauaaaguucucuuag

SEQ ID NO: 886 - RNA, 19 nt, Artificial Sequence
  Description of Artificial Sequence: Synthetic oligonucleotide
aaaauaaaguucucuuagc

SEQ ID NO: 887 - RNA, 19 nt, Artificial Sequence
  Description of Artificial Sequence: Synthetic oligonucleotide
aaauaaaguucucuuagcg

SEQ ID NO: 888 - RNA, 19 nt, Artificial Sequence
  Description of Artificial Sequence: Synthetic oligonucleotide
aauaaaguucucuuagcgu

SEQ ID NO: 889 - RNA, 19 nt, Artificial Sequence
  Description of Artificial Sequence: Synthetic oligonucleotide
auaaaguucucuuagcguu

SEQ ID NO: 890 - RNA, 19 nt, Artificial Sequence
  Description of Artificial Sequence: Synthetic oligonucleotide
uaaaguucucuuagcguuu

SEQ ID NO: 891 - RNA, 19 nt, Artificial Sequence
  Description of Artificial Sequence: Synthetic oligonucleotide
aaaguucucuuagcguuug

SEQ ID NO: 892 - RNA, 19 nt, Artificial Sequence
  Description of Artificial Sequence: Synthetic oligonucleotide
aaguucucuuagcguuugu

SEQ ID NO: 893 - RNA, 19 nt, Artificial Sequence
  Description of Artificial Sequence: Synthetic oligonucleotide
aguucucuuagcguuugug

SEQ ID NO: 894 - RNA, 19 nt, Artificial Sequence
  Description of Artificial Sequence: Synthetic oligonucleotide
guucucuuagcguuugugg

SEQ ID NO: 895 - RNA, 19 nt, Artificial Sequence
  Description of Artificial Sequence: Synthetic oligonucleotide
uucucuuagcguuugugga

SEQ ID NO: 896 - RNA, 19 nt, Artificial Sequence
  Description of Artificial Sequence: Synthetic oligonucleotide
ucucuuagcguuuguggaa

SEQ ID NO: 897 - RNA, 19 nt, Artificial Sequence
  Description of Artificial Sequence: Synthetic oligonucleotide
cucuuagcguuuguggaau

SEQ ID NO: 898 - RNA, 19 nt, Artificial Sequence
  Description of Artificial Sequence: Synthetic oligonucleotide
ucuuagcguuuguggaauc

SEQ ID NO: 899 - RNA, 19 nt, Artificial Sequence
  Description of Artificial Sequence: Synthetic oligonucleotide
cuuagcguuuguggaaucu

SEQ ID NO: 900 - RNA, 19 nt, Artificial Sequence
  Description of Artificial Sequence: Synthetic oligonucleotide
uuagcguuuguggaaucug

SEQ ID NO: 901 - RNA, 19 nt, Artificial Sequence
  Description of Artificial Sequence: Synthetic oligonucleotide
uagcguuuguggaaucugc

SEQ ID NO: 902 - RNA, 19 nt, Artificial Sequence
  Description of Artificial Sequence: Synthetic oligonucleotide
agcguuuguggaaucugcc

SEQ ID NO: 903 - RNA, 19 nt, Artificial Sequence
  Description of Artificial Sequence: Synthetic oligonucleotide
gcguuuguggaaucugccg

SEQ ID NO: 904 - RNA, 19 nt, Artificial Sequence
  Description of Artificial Sequence: Synthetic oligonucleotide
cguuuguggaaucugccga

SEQ ID NO: 905 - RNA, 19 nt, Artificial Sequence
  Description of Artificial Sequence: Synthetic oligonucleotide
guuuguggaaucugccgag

SEQ ID NO: 906 - RNA, 19 nt, Artificial Sequence
  Description of Artificial Sequence: Synthetic oligonucleotide
uuuguggaaucugccgagc

SEQ ID NO: 907 - RNA, 19 nt, Artificial Sequence
  Description of Artificial Sequence: Synthetic oligonucleotide
uuguggaaucugccgagcc

SEQ ID NO: 908 - RNA, 19 nt, Artificial Sequence
  Description of Artificial Sequence: Synthetic oligonucleotide
uguggaaucugccgagcca

SEQ ID NO: 909 - RNA, 19 nt, Artificial Sequence
  Description of Artificial Sequence: Synthetic oligonucleotide
guggaaucugccgagccau

SEQ ID NO: 910 - RNA, 19 nt, Artificial Sequence
  Description of Artificial Sequence: Synthetic oligonucleotide
uggaaucugccgagccauu

SEQ ID NO: 911 - RNA, 19 nt, Artificial Sequence
  Description of Artificial Sequence: Synthetic oligonucleotide
ggaaucugccgagccauuu

SEQ ID NO: 912 - RNA, 19 nt, Artificial Sequence
  Description of Artificial Sequence: Synthetic oligonucleotide
gaaucugccgagccauuuu

SEQ ID NO: 913 - RNA, 19 nt, Artificial Sequence
  Description of Artificial Sequence: Synthetic oligonucleotide
aaucugccgagccauuuug

SEQ ID NO: 914 - RNA, 19 nt, Artificial Sequence
  Description of Artificial Sequence: Synthetic oligonucleotide
aucugccgagccauuuugu

SEQ ID NO: 915 - RNA, 19 nt, Artificial Sequence
  Description of Artificial Sequence: Synthetic oligonucleotide
ucugccgagccauuuugug

SEQ ID NO: 916 - RNA, 19 nt, Artificial Sequence
  Description of Artificial Sequence: Synthetic oligonucleotide
cugccgagccauuuugugg

SEQ ID NO: 917 - RNA, 19 nt, Artificial Sequence
  Description of Artificial Sequence: Synthetic oligonucleotide
ugccgagccauuuugugga

SEQ ID NO: 918 - RNA, 19 nt, Artificial Sequence
  Description of Artificial Sequence: Synthetic oligonucleotide
gccgagccauuuuguggaa

SEQ ID NO: 919 - RNA, 19 nt, Artificial Sequence
  Description of Artificial Sequence: Synthetic oligonucleotide
ccgagccauuuuguggaaa

SEQ ID NO: 920 - RNA, 19 nt, Artificial Sequence
  Description of Artificial Sequence: Synthetic oligonucleotide
cgagccauuuuguggaaau

SEQ ID NO: 921 - RNA, 19 nt, Artificial Sequence
  Description of Artificial Sequence: Synthetic oligonucleotide
gagccauuuuguggaaauu

SEQ ID NO: 922 - RNA, 19 nt, Artificial Sequence
  Description of Artificial Sequence: Synthetic oligonucleotide
agccauuuuguggaaauug

SEQ ID NO: 923 - RNA, 19 nt, Artificial Sequence
  Description of Artificial Sequence: Synthetic oligonucleotide
gccauuuuguggaaauugg

SEQ ID NO: 924 - RNA, 19 nt, Artificial Sequence
  Description of Artificial Sequence: Synthetic oligonucleotide
ccauuuuguggaaauuggg

SEQ ID NO: 925 - RNA, 19 nt, Artificial Sequence
  Description of Artificial Sequence: Synthetic oligonucleotide
cauuuuguggaaauuggga

SEQ ID NO: 926 - RNA, 19 nt, Artificial Sequence
  Description of Artificial Sequence: Synthetic oligonucleotide
auuuuguggaaauugggau

SEQ ID NO: 927 - RNA, 19 nt, Artificial Sequence
  Description of Artificial Sequence: Synthetic oligonucleotide
uuuuguggaaauugggauc

SEQ ID NO: 928 - RNA, 19 nt, Artificial Sequence
  Description of Artificial Sequence: Synthetic oligonucleotide
uuuguggaaauugggaucc

SEQ ID NO: 929 - RNA, 19 nt, Artificial Sequence
  Description of Artificial Sequence: Synthetic oligonucleotide
uuguggaaauugggaucca

SEQ ID NO: 930 - RNA, 19 nt, Artificial Sequence
  Description of Artificial Sequence: Synthetic oligonucleotide
uguggaaauugggauccau

SEQ ID NO: 931 - RNA, 19 nt, Artificial Sequence
  Description of Artificial Sequence: Synthetic oligonucleotide
guggaaauugggauccaua

SEQ ID NO: 932 - RNA, 19 nt, Artificial Sequence
  Description of Artificial Sequence: Synthetic oligonucleotide
uggaaauugggauccauau

SEQ ID NO: 933 - RNA, 19 nt, Artificial Sequence
  Description of Artificial Sequence: Synthetic oligonucleotide
ggaaauugggauccauauc

SEQ ID NO: 934 - RNA, 19 nt, Artificial Sequence
  Description of Artificial Sequence: Synthetic oligonucleotide
gaaauugggauccauaucu

SEQ ID NO: 935 - RNA, 19 nt, Artificial Sequence
  Description of Artificial Sequence: Synthetic oligonucleotide
aaauugggauccauaucug

SEQ ID NO: 936 - RNA, 19 nt, Artificial Sequence
  Description of Artificial Sequence: Synthetic oligonucleotide
aauugggauccauaucugg

SEQ ID NO: 937 - RNA, 19 nt, Artificial Sequence
  Description of Artificial Sequence: Synthetic oligonucleotide
auugggauccauaucugga

SEQ ID NO: 938 - RNA, 19 nt, Artificial Sequence
  Description of Artificial Sequence: Synthetic oligonucleotide
uugggauccauaucuggag

SEQ ID NO: 939 - RNA, 19 nt, Artificial Sequence
  Description of Artificial Sequence: Synthetic oligonucleotide
ugggauccauaucuggaga

SEQ ID NO: 940 - RNA, 19 nt, Artificial Sequence
  Description of Artificial Sequence: Synthetic oligonucleotide
gggauccauaucuggagac

SEQ ID NO: 941 - RNA, 19 nt, Artificial Sequence
  Description of Artificial Sequence: Synthetic oligonucleotide
ggauccauaucuggagaca

SEQ ID NO: 942 - RNA, 19 nt, Artificial Sequence
  Description of Artificial Sequence: Synthetic oligonucleotide
gauccauaucuggagacac

SEQ ID NO: 943 - RNA, 19 nt, Artificial Sequence
  Description of Artificial Sequence: Synthetic oligonucleotide
auccauaucuggagacacu

SEQ ID NO: 944 - RNA, 19 nt, Artificial Sequence
  Description of Artificial Sequence: Synthetic oligonucleotide
uccauaucuggagacacuu

SEQ ID NO: 945 - RNA, 19 nt, Artificial Sequence
  Description of Artificial Sequence: Synthetic oligonucleotide
ccauaucuggagacacuuc

SEQ ID NO: 946 - RNA, 19 nt, Artificial Sequence
  Description of Artificial Sequence: Synthetic oligonucleotide
cauaucuggagacacuucc

SEQ ID NO: 947 - RNA, 19 nt, Artificial Sequence
  Description of Artificial Sequence: Synthetic oligonucleotide
auaucuggagacacuuccc

SEQ ID NO: 948 - RNA, 19 nt, Artificial Sequence
  Description of Artificial Sequence: Synthetic oligonucleotide
uaucuggagacacuuccca

SEQ ID NO: 949 - RNA, 19 nt, Artificial Sequence
  Description of Artificial Sequence: Synthetic oligonucleotide
aucuggagacacuucccaa

SEQ ID NO: 950 - RNA, 19 nt, Artificial Sequence
  Description of Artificial Sequence: Synthetic oligonucleotide
ucuggagacacuucccaag

SEQ ID NO: 951 - RNA, 19 nt, Artificial Sequence
  Description of Artificial Sequence: Synthetic oligonucleotide
cuggagacacuucccaagg

SEQ ID NO: 952 - RNA, 19 nt, Artificial Sequence
  Description of Artificial Sequence: Synthetic oligonucleotide
uggagacacuucccaaggc

SEQ ID NO: 953 - RNA, 19 nt, Artificial Sequence
  Description of Artificial Sequence: Synthetic oligonucleotide
ggagacacuucccaaggcc

SEQ ID NO: 954 - RNA, 19 nt, Artificial Sequence
  Description of Artificial Sequence: Synthetic oligonucleotide
gagacacuucccaaggccu

SEQ ID NO: 955 - RNA, 19 nt, Artificial Sequence
  Description of Artificial Sequence: Synthetic oligonucleotide
agacacuucccaaggccug

SEQ ID NO: 956 - RNA, 19 nt, Artificial Sequence
  Description of Artificial Sequence: Synthetic oligonucleotide
gacacuucccaaggccugc

SEQ ID NO: 957 - RNA, 19 nt, Artificial Sequence
  Description of Artificial Sequence: Synthetic oligonucleotide
acacuucccaaggccugcc

SEQ ID NO: 958 - RNA, 19 nt, Artificial Sequence
  Description of Artificial Sequence: Synthetic oligonucleotide
cacuucccaaggccugccu

SEQ ID NO: 959 - RNA, 19 nt, Artificial Sequence
  Description of Artificial Sequence: Synthetic oligonucleotide
acuucccaaggccugccuc

SEQ ID NO: 960 - RNA, 19 nt, Artificial Sequence
  Description of Artificial Sequence: Synthetic oligonucleotide
cuucccaaggccugccuca

SEQ ID NO: 961 - RNA, 19 nt, Artificial Sequence
  Description of Artificial Sequence: Synthetic oligonucleotide
uucccaaggccugccucac

SEQ ID NO: 962 - RNA, 19 nt, Artificial Sequence
  Description of Artificial Sequence: Synthetic oligonucleotide
ucccaaggccugccucacc

SEQ ID NO: 963 - RNA, 19 nt, Artificial Sequence
  Description of Artificial Sequence: Synthetic oligonucleotide
cccaaggccugccucaccu

SEQ ID NO: 964 - RNA, 19 nt, Artificial Sequence
  Description of Artificial Sequence: Synthetic oligonucleotide
ccaaggccugccucaccuc

SEQ ID NO: 965 - RNA, 19 nt, Artificial Sequence
  Description of Artificial Sequence: Synthetic oligonucleotide
caaggccugccucaccucc

SEQ ID NO: 966 - RNA, 19 nt, Artificial Sequence
  Description of Artificial Sequence: Synthetic oligonucleotide
aaggccugccucaccucca

SEQ ID NO: 967 - RNA, 19 nt, Artificial Sequence
  Description of Artificial Sequence: Synthetic oligonucleotide
aggccugccucaccuccac

SEQ ID NO: 968 - RNA, 19 nt, Artificial Sequence
  Description of Artificial Sequence: Synthetic oligonucleotide
ggccugccucaccuccacc

SEQ ID NO: 969 - RNA, 19 nt, Artificial Sequence
  Description of Artificial Sequence: Synthetic oligonucleotide
gccugccucaccuccaccc

SEQ ID NO: 970 - RNA, 19 nt, Artificial Sequence
  Description of Artificial Sequence: Synthetic oligonucleotide
ccugccucaccuccacccc

SEQ ID NO: 971 - RNA, 19 nt, Artificial Sequence
  Description of Artificial Sequence: Synthetic oligonucleotide
cugccucaccuccaccccc

SEQ ID NO: 972 - RNA, 19 nt, Artificial Sequence
  Description of Artificial Sequence: Synthetic oligonucleotide
ugccucaccuccacccccu

SEQ ID NO: 973 - RNA, 19 nt, Artificial Sequence
  Description of Artificial Sequence: Synthetic oligonucleotide
gccucaccuccacccccug

SEQ ID NO: 974 - RNA, 19 nt, Artificial Sequence
  Description of Artificial Sequence: Synthetic oligonucleotide
ccucaccuccacccccugc

SEQ ID NO: 975 - RNA, 19 nt, Artificial Sequence
  Description of Artificial Sequence: Synthetic oligonucleotide
cucaccuccacccccugcc

SEQ ID NO: 976 - RNA, 19 nt, Artificial Sequence
  Description of Artificial Sequence: Synthetic oligonucleotide
ucaccuccacccccugccc

SEQ ID NO: 977 - RNA, 19 nt, Artificial Sequence
  Description of Artificial Sequence: Synthetic oligonucleotide
caccuccacccccugccca

SEQ ID NO: 978 - RNA, 19 nt, Artificial Sequence
  Description of Artificial Sequence: Synthetic oligonucleotide
accuccacccccugcccac

SEQ ID NO: 979 - RNA, 19 nt, Artificial Sequence
  Description of Artificial Sequence: Synthetic oligonucleotide
ccuccacccccugcccacc

SEQ ID NO: 980 - RNA, 19 nt, Artificial Sequence
  Description of Artificial Sequence: Synthetic oligonucleotide
cuccacccccugcccaccu

SEQ ID NO: 981 - RNA, 19 nt, Artificial Sequence
  Description of Artificial Sequence: Synthetic oligonucleotide
uccacccccugcccaccuu

SEQ ID NO: 982 - RNA, 19 nt, Artificial Sequence
  Description of Artificial Sequence: Synthetic oligonucleotide
ccacccccugcccaccuug

SEQ ID NO: 983 - RNA, 19 nt, Artificial Sequence
  Description of Artificial Sequence: Synthetic oligonucleotide
cacccccugcccaccuuga

SEQ ID NO: 984 - RNA, 19 nt, Artificial Sequence
  Description of Artificial Sequence: Synthetic oligonucleotide
acccccugcccaccuugau

SEQ ID NO: 985 - RNA, 19 nt, Artificial Sequence
  Description of Artificial Sequence: Synthetic oligonucleotide
cccccugcccaccuugauc

SEQ ID NO: 986 - RNA, 19 nt, Artificial Sequence
  Description of Artificial Sequence: Synthetic oligonucleotide
ccccugcccaccuugaucc

SEQ ID NO: 987 - RNA, 19 nt, Artificial Sequence
  Description of Artificial Sequence: Synthetic oligonucleotide
cccugcccaccuugaucca

SEQ ID NO: 988 - RNA, 19 nt, Artificial Sequence
  Description of Artificial Sequence: Synthetic oligonucleotide
ccugcccaccuugauccau

SEQ ID NO: 989 - RNA, 19 nt, Artificial Sequence
  Description of Artificial Sequence: Synthetic oligonucleotide
cugcccaccuugauccaug

SEQ ID NO: 990 - RNA, 19 nt, Artificial Sequence
  Description of Artificial Sequence: Synthetic oligonucleotide
ugcccaccuugauccaugc

SEQ ID NO: 991 - RNA, 19 nt, Artificial Sequence
  Description of Artificial Sequence: Synthetic oligonucleotide
gcccaccuugauccaugcu

SEQ ID NO: 992 - RNA, 19 nt, Artificial Sequence
  Description of Artificial Sequence: Synthetic oligonucleotide
cccaccuugauccaugcuc

SEQ ID NO: 993 - RNA, 19 nt, Artificial Sequence
  Description of Artificial Sequence: Synthetic oligonucleotide
ccaccuugauccaugcucc

SEQ ID NO: 994 - RNA, 19 nt, Artificial Sequence
  Description of Artificial Sequence: Synthetic oligonucleotide
caccuugauccaugcuccu

SEQ ID NO: 995 - RNA, 19 nt, Artificial Sequence
  Description of Artificial Sequence: Synthetic oligonucleotide
accuugauccaugcuccuu

SEQ ID NO: 996 - RNA, 19 nt, Artificial Sequence
  Description of Artificial Sequence: Synthetic oligonucleotide
ccuugauccaugcuccuuu

SEQ ID NO: 997 - RNA, 19 nt, Artificial Sequence
  Description of Artificial Sequence: Synthetic oligonucleotide
cuugauccaugcuccuuug

SEQ ID NO: 998 - RNA, 19 nt, Artificial Sequence
  Description of Artificial Sequence: Synthetic oligonucleotide
uugauccaugcuccuuuga

SEQ ID NO: 999 - RNA, 19 nt, Artificial Sequence
  Description of Artificial Sequence: Synthetic oligonucleotide
ugauccaugcuccuuugac

SEQ ID NO: 1000 - RNA, 19 nt, Artificial Sequence
  Description of Artificial Sequence: Synthetic oligonucleotide
gauccaugcuccuuugacc

SEQ ID NO: 1001 - RNA, 19 nt, Artificial Sequence
  Description of Artificial Sequence: Synthetic oligonucleotide
auccaugcuccuuugaccu

SEQ ID NO: 1002 - RNA, 19 nt, Artificial Sequence
  Description of Artificial Sequence: Synthetic oligonucleotide
uccaugcuccuuugaccuc

SEQ ID NO: 1003 - RNA, 19 nt, Artificial Sequence
  Description of Artificial Sequence: Synthetic oligonucleotide
ccaugcuccuuugaccucc

SEQ ID NO: 1004 - RNA, 19 nt, Artificial Sequence
  Description of Artificial Sequence: Synthetic oligonucleotide
caugcuccuuugaccuccu

SEQ ID NO: 1005 - RNA, 19 nt, Artificial Sequence
  Description of Artificial Sequence: Synthetic oligonucleotide
augcuccuuugaccuccuc

SEQ ID NO: 1006 - RNA, 19 nt, Artificial Sequence
  Description of Artificial Sequence: Synthetic oligonucleotide
ugcuccuuugaccuccucg

SEQ ID NO: 1007 - RNA, 19 nt, Artificial Sequence
  Description of Artificial Sequence: Synthetic oligonucleotide
gcuccuuugaccuccucgu

SEQ ID NO: 1008 - RNA, 19 nt, Artificial Sequence
  Description of Artificial Sequence: Synthetic oligonucleotide
cuccuuugaccuccucgug

SEQ ID NO: 1009 - RNA, 19 nt, Artificial Sequence
  Description of Artificial Sequence: Synthetic oligonucleotide
uccuuugaccuccucgugu

SEQ ID NO: 1010 - RNA, 19 nt, Artificial Sequence
  Description of Artificial Sequence: Synthetic oligonucleotide
ccuuugaccuccucgugug

SEQ ID NO: 1011 - RNA, 19 nt, Artificial Sequence
  Description of Artificial Sequence: Synthetic oligonucleotide
cuuugaccuccucguguga

SEQ ID NO: 1012 - RNA, 19 nt, Artificial Sequence
  Description of Artificial Sequence: Synthetic oligonucleotide
uuugaccuccucgugugag

SEQ ID NO: 1013 - RNA, 19 nt, Artificial Sequence
  Description of Artificial Sequence: Synthetic oligonucleotide
uugaccuccucgugugaga

SEQ ID NO: 1014 - RNA, 19 nt, Artificial Sequence
  Description of Artificial Sequence: Synthetic oligonucleotide
ugaccuccucgugugagaa

SEQ ID NO: 1015 - RNA, 19 nt, Artificial Sequence
  Description of Artificial Sequence: Synthetic oligonucleotide
gaccuccucgugugagaac

SEQ ID NO: 1016 - RNA, 19 nt, Artificial Sequence
  Description of Artificial Sequence: Synthetic oligonucleotide
accuccucgugugagaacc

SEQ ID NO: 1017 - RNA, 19 nt, Artificial Sequence
  Description of Artificial Sequence: Synthetic oligonucleotide
ccuccucgugugagaaccc

SEQ ID NO: 1018 - RNA, 19 nt, Artificial Sequence
  Description of Artificial Sequence: Synthetic oligonucleotide
cuccucgugugagaacccc

SEQ ID NO: 1019 - RNA, 19 nt, Artificial Sequence
  Description of Artificial Sequence: Synthetic oligonucleotide
uccucgugugagaaccccu

SEQ ID NO: 1020 - RNA, 19 nt, Artificial Sequence
  Description of Artificial Sequence: Synthetic oligonucleotide
ccucgugugagaaccccuu

SEQ ID NO: 1021 - RNA, 19 nt, Artificial Sequence
  Description of Artificial Sequence: Synthetic oligonucleotide
cucgugugagaaccccuuu

SEQ ID NO: 1022 - RNA, 19 nt, Artificial Sequence
  Description of Artificial Sequence: Synthetic oligonucleotide
ucgugugagaaccccuuug

SEQ ID NO: 1023 - RNA, 19 nt, Artificial Sequence
  Description of Artificial Sequence: Synthetic oligonucleotide
cgugugagaaccccuuugc

SEQ ID NO: 1024 - RNA, 19 nt, Artificial Sequence
  Description of Artificial Sequence: Synthetic oligonucleotide
gugugagaaccccuuugcc

SEQ ID NO: 1025 - RNA, 19 nt, Artificial Sequence
  Description of Artificial Sequence: Synthetic oligonucleotide
ugugagaaccccuuugcca

SEQ ID NO: 1026 - RNA, 19 nt, Artificial Sequence
  Description of Artificial Sequence: Synthetic oligonucleotide
gugagaaccccuuugccag

SEQ ID NO: 1027 - RNA, 19 nt, Artificial Sequence
  Description of Artificial Sequence: Synthetic oligonucleotide
ugagaaccccuuugccaga

SEQ ID NO: 1028 - RNA, 19 nt, Artificial Sequence
  Description of Artificial Sequence: Synthetic oligonucleotide
gagaaccccuuugccagag

SEQ ID NO: 1029 - RNA, 19 nt, Artificial Sequence
  Description of Artificial Sequence: Synthetic oligonucleotide
agaaccccuuugccagagu

SEQ ID NO: 1030 - RNA, 19 nt, Artificial Sequence
  Description of Artificial Sequence: Synthetic oligonucleotide
gaaccccuuugccagagug

SEQ ID NO: 1031 - RNA, 19 nt, Artificial Sequence
  Description of Artificial Sequence: Synthetic oligonucleotide
aaccccuuugccagaguga

SEQ ID NO: 1032 - RNA, 19 nt, Artificial Sequence
  Description of Artificial Sequence: Synthetic oligonucleotide
accccuuugccagagugag

SEQ ID NO: 1033 - RNA, 19 nt, Artificial Sequence
  Description of Artificial Sequence: Synthetic oligonucleotide
ccccuuugccagagugaga

SEQ ID NO: 1034 - RNA, 19 nt, Artificial Sequence
  Description of Artificial Sequence: Synthetic oligonucleotide
cccuuugccagagugagac

SEQ ID NO: 1035 - RNA, 19 nt, Artificial Sequence
  Description of Artificial Sequence: Synthetic oligonucleotide
ccuuugccagagugagacg

SEQ ID NO: 1036 - RNA, 19 nt, Artificial Sequence
  Description of Artificial Sequence: Synthetic oligonucleotide
cuuugccagagugagacgu

SEQ ID NO: 1037 - RNA, 19 nt, Artificial Sequence
  Description of Artificial Sequence: Synthetic oligonucleotide
uuugccagagugagacgug

SEQ ID NO: 1038 - RNA, 19 nt, Artificial Sequence
  Description of Artificial Sequence: Synthetic oligonucleotide
uugccagagugagacgugu

SEQ ID NO: 1039 - RNA, 19 nt, Artificial Sequence
  Description of Artificial Sequence: Synthetic oligonucleotide
ugccagagugagacgugug

SEQ ID NO: 1040 - RNA, 19 nt, Artificial Sequence
  Description of Artificial Sequence: Synthetic oligonucleotide
gccagagugagacgugugc

SEQ ID NO: 1041 - RNA, 19 nt, Artificial Sequence
  Description of Artificial Sequence: Synthetic oligonucleotide
ccagagugagacgugugca

SEQ ID NO: 1042 - RNA, 19 nt, Artificial Sequence
  Description of Artificial Sequence: Synthetic oligonucleotide
cagagugagacgugugcag

SEQ ID NO: 1043 - RNA, 19 nt, Artificial Sequence
  Description of Artificial Sequence: Synthetic oligonucleotide
agagugagacgugugcaga

SEQ ID NO: 1044 - RNA, 19 nt, Artificial Sequence
  Description of Artificial Sequence: Synthetic oligonucleotide
gagugagacgugugcagaa

SEQ ID NO: 1045 - RNA, 19 nt, Artificial Sequence
  Description of Artificial Sequence: Synthetic oligonucleotide
agugagacgugugcagaau

SEQ ID NO: 1046 - RNA, 19 nt, Artificial Sequence
  Description of Artificial Sequence: Synthetic oligonucleotide
gugagacgugugcagaaug

SEQ ID NO: 1047 - RNA, 19 nt, Artificial Sequence
  Description of Artificial Sequence: Synthetic oligonucleotide
ugagacgugugcagaauga

SEQ ID NO: 1048 - RNA, 19 nt, Artificial Sequence
  Description of Artificial Sequence: Synthetic oligonucleotide
gagacgugugcagaaugaa

SEQ ID NO: 1049 - RNA, 19 nt, Artificial Sequence
  Description of Artificial Sequence: Synthetic oligonucleotide
agacgugugcagaaugaac

SEQ ID NO: 1050 - RNA, 19 nt, Artificial Sequence
  Description of Artificial Sequence: Synthetic oligonucleotide
gacgugugcagaaugaacu

SEQ ID NO: 1051 - RNA, 19 nt, Artificial Sequence
  Description of Artificial Sequence: Synthetic oligonucleotide
acgugugcagaaugaacua

SEQ ID NO: 1052 - RNA, 19 nt, Artificial Sequence
  Description of Artificial Sequence: Synthetic oligonucleotide
cgugugcagaaugaacuaa

SEQ ID NO: 1053 - RNA, 19 nt, Artificial Sequence
  Description of Artificial Sequence: Synthetic oligonucleotide
gugugcagaaugaacuaag

SEQ ID NO: 1054 - RNA, 19 nt, Artificial Sequence
  Description of Artificial Sequence: Synthetic oligonucleotide
ugugcagaaugaacuaagc

SEQ ID NO: 1055 - RNA, 19 nt, Artificial Sequence
  Description of Artificial Sequence: Synthetic oligonucleotide
gugcagaaugaacuaagcc

SEQ ID NO: 1056 - RNA, 19 nt, Artificial Sequence
  Description of Artificial Sequence: Synthetic oligonucleotide
ugcagaaugaacuaagccc

SEQ ID NO: 1057 - RNA, 19 nt, Artificial Sequence
  Description of Artificial Sequence: Synthetic oligonucleotide
gcagaaugaacuaagcccc

SEQ ID NO: 1058 - RNA, 19 nt, Artificial Sequence
  Description of Artificial Sequence: Synthetic oligonucleotide
cagaaugaacuaagcccca

SEQ ID NO: 1059 - RNA, 19 nt, Artificial Sequence
  Description of Artificial Sequence: Synthetic oligonucleotide
agaaugaacuaagccccag

SEQ ID NO: 1060 - RNA, 19 nt, Artificial Sequence
  Description of Artificial Sequence: Synthetic oligonucleotide
gaaugaacuaagccccaga

SEQ ID NO: 1061 - RNA, 19 nt, Artificial Sequence
  Description of Artificial Sequence: Synthetic oligonucleotide
aaugaacuaagccccagag

SEQ ID NO: 1062 - RNA, 19 nt, Artificial Sequence
  Description of Artificial Sequence: Synthetic oligonucleotide
augaacuaagccccagagg

SEQ ID NO: 1063 - RNA, 19 nt, Artificial Sequence
  Description of Artificial Sequence: Synthetic oligonucleotide
ugaacuaagccccagaggg

SEQ ID NO: 1064 - RNA, 19 nt, Artificial Sequence
  Description of Artificial Sequence: Synthetic oligonucleotide
gaacuaagccccagagggu

SEQ ID NO: 1065 - RNA, 19 nt, Artificial Sequence
  Description of Artificial Sequence: Synthetic oligonucleotide
aacuaagccccagaggguu

SEQ ID NO: 1066 - RNA, 19 nt, Artificial Sequence
  Description of Artificial Sequence: Synthetic oligonucleotide
acuaagccccagaggguuu

SEQ ID NO: 1067 - RNA, 19 nt, Artificial Sequence
  Description of Artificial Sequence: Synthetic oligonucleotide
cuaagccccagaggguuuu

SEQ ID NO: 1068 - RNA, 19 nt, Artificial Sequence
  Description of Artificial Sequence: Synthetic oligonucleotide
uaagccccagaggguuuua

SEQ ID NO: 1069 - RNA, 19 nt, Artificial Sequence
  Description of Artificial Sequence: Synthetic oligonucleotide
aagccccagaggguuuuaa

SEQ ID NO: 1070 - RNA, 19 nt, Artificial Sequence
  Description of Artificial Sequence: Synthetic oligonucleotide
agccccagaggguuuuaau

SEQ ID NO: 1071 - RNA, 19 nt, Artificial Sequence
  Description of Artificial Sequence: Synthetic oligonucleotide
gccccagaggguuuuaaug

SEQ ID NO: 1072 - RNA, 19 nt, Artificial Sequence
  Description of Artificial Sequence: Synthetic oligonucleotide
ccccagaggguuuuaaugg

SEQ ID NO: 1073 - RNA, 19 nt, Artificial Sequence
  Description of Artificial Sequence: Synthetic oligonucleotide
cccagaggguuuuaauggc

SEQ ID NO: 1074 - RNA, 19 nt, Artificial Sequence
  Description of Artificial Sequence: Synthetic oligonucleotide
ccagaggguuuuaauggcu

SEQ ID NO: 1075 - RNA, 19 nt, Artificial Sequence
  Description of Artificial Sequence: Synthetic oligonucleotide
cagaggguuuuaauggcuu

SEQ ID NO: 1076 - RNA, 19 nt, Artificial Sequence
  Description of Artificial Sequence: Synthetic oligonucleotide
agaggguuuuaauggcuug

SEQ ID NO: 1077 - RNA, 19 nt, Artificial Sequence
  Description of Artificial Sequence: Synthetic oligonucleotide
gaggguuuuaauggcuugc

SEQ ID NO: 1078 - RNA, 19 nt, Artificial Sequence
  Description of Artificial Sequence: Synthetic oligonucleotide
aggguuuuaauggcuugcc

SEQ ID NO: 1079 - RNA, 19 nt, Artificial Sequence
  Description of Artificial Sequence: Synthetic oligonucleotide
ggguuuuaauggcuugccu

SEQ ID NO: 1080 - RNA, 19 nt, Artificial Sequence
  Description of Artificial Sequence: Synthetic oligonucleotide
gguuuuaauggcuugccug

SEQ ID NO: 1081 - RNA, 19 nt, Artificial Sequence
  Description of Artificial Sequence: Synthetic oligonucleotide
guuuuaauggcuugccugc

SEQ ID NO: 1082 - RNA, 19 nt, Artificial Sequence
  Description of Artificial Sequence: Synthetic oligonucleotide
uuuuaauggcuugccugcu

SEQ ID NO: 1083 - RNA, 19 nt, Artificial Sequence
  Description of Artificial Sequence: Synthetic oligonucleotide
uuuaauggcuugccugcug

SEQ ID NO: 1084 - RNA, 19 nt, Artificial Sequence
  Description of Artificial Sequence: Synthetic oligonucleotide
uuaauggcuugccugcugu

SEQ ID NO: 1085 - RNA, 19 nt, Artificial Sequence
  Description of Artificial Sequence: Synthetic oligonucleotide
uaauggcuugccugcuguu

SEQ ID NO: 1086 - RNA, 19 nt, Artificial Sequence
  Description of Artificial Sequence: Synthetic oligonucleotide
aauggcuugccugcuguuu

SEQ ID NO: 1087 - RNA, 19 nt, Artificial Sequence
  Description of Artificial Sequence: Synthetic oligonucleotide
auggcuugccugcuguuuc

SEQ ID NO: 1088 - RNA, 19 nt, Artificial Sequence
  Description of Artificial Sequence: Synthetic oligonucleotide
uggcuugccugcuguuucc

SEQ ID NO: 1089 - RNA, 19 nt, Artificial Sequence
  Description of Artificial Sequence: Synthetic oligonucleotide
ggcuugccugcuguuuccc

SEQ ID NO: 1090 - RNA, 19 nt, Artificial Sequence
  Description of Artificial Sequence: Synthetic oligonucleotide
gcuugccugcuguuuccca

SEQ ID NO: 1091 - RNA, 19 nt, Artificial Sequence
  Description of Artificial Sequence: Synthetic oligonucleotide
cuugccugcuguuucccac

SEQ ID NO: 1092 - RNA, 19 nt, Artificial Sequence
  Description of Artificial Sequence: Synthetic oligonucleotide
uugccugcuguuucccaca

SEQ ID NO: 1093 - RNA, 19 nt, Artificial Sequence
  Description of Artificial Sequence: Synthetic oligonucleotide
ugccugcuguuucccacau

SEQ ID NO: 1094 - RNA, 19 nt, Artificial Sequence
  Description of Artificial Sequence: Synthetic oligonucleotide
gccugcuguuucccacaua

SEQ ID NO: 1095 - RNA, 19 nt, Artificial Sequence
  Description of Artificial Sequence: Synthetic oligonucleotide
ccugcuguuucccacauaa

SEQ ID NO: 1096 - RNA, 19 nt, Artificial Sequence
  Description of Artificial Sequence: Synthetic oligonucleotide
cugcuguuucccacauaaa

SEQ ID NO: 1097 - RNA, 19 nt, Artificial Sequence
  Description of Artificial Sequence: Synthetic oligonucleotide
ugcuguuucccacauaaac

SEQ ID NO: 1098 - RNA, 19 nt, Artificial Sequence
  Description of Artificial Sequence: Synthetic oligonucleotide
gcuguuucccacauaaacu

SEQ ID NO: 1099 - RNA, 19 nt, Artificial Sequence
  Description of Artificial Sequence: Synthetic oligonucleotide
cuguuucccacauaaacua

SEQ ID NO: 1100 - RNA, 19 nt, Artificial Sequence
  Description of Artificial Sequence: Synthetic oligonucleotide
uguuucccacauaaacuac

SEQ ID NO: 1101 - RNA, 19 nt, Artificial Sequence
  Description of Artificial Sequence: Synthetic oligonucleotide
guuucccacauaaacuacc

SEQ ID NO: 1102 - RNA, 19 nt, Artificial Sequence
  Description of Artificial Sequence: Synthetic oligonucleotide
uuucccacauaaacuaccu

SEQ ID NO: 1103 - RNA, 19 nt, Artificial Sequence
  Description of Artificial Sequence: Synthetic oligonucleotide
uucccacauaaacuaccuc

SEQ ID NO: 1104 - RNA, 19 nt, Artificial Sequence
  Description of Artificial Sequence: Synthetic oligonucleotide
ucccacauaaacuaccuca

SEQ ID NO: 1105 - RNA, 19 nt, Artificial Sequence
  Description of Artificial Sequence: Synthetic oligonucleotide
cccacauaaacuaccucag

SEQ ID NO: 1106 - RNA, 19 nt, Artificial Sequence
  Description of Artificial Sequence: Synthetic oligonucleotide
ccacauaaacuaccucagg

SEQ ID NO: 1107 - RNA, 19 nt, Artificial Sequence
  Description of Artificial Sequence: Synthetic oligonucleotide
cacauaaacuaccucagga

SEQ ID NO: 1108 - RNA, 19 nt, Artificial Sequence
  Description of Artificial Sequence: Synthetic oligonucleotide
acauaaacuaccucaggag

SEQ ID NO: 1109 - RNA, 19 nt, Artificial Sequence
  Description of Artificial Sequence: Synthetic oligonucleotide
cauaaacuaccucaggagu

SEQ ID NO: 1110 - RNA, 19 nt, Artificial Sequence
  Description of Artificial Sequence: Synthetic oligonucleotide
auaaacuaccucaggaguc

SEQ ID NO: 1111 - RNA, 19 nt, Artificial Sequence
  Description of Artificial Sequence: Synthetic oligonucleotide
uaaacuaccucaggaguca

SEQ ID NO: 1112 - RNA, 19 nt, Artificial Sequence
  Description of Artificial Sequence: Synthetic oligonucleotide
aaacuaccucaggagucac

SEQ ID NO: 1113 - RNA, 19 nt, Artificial Sequence
  Description of Artificial Sequence: Synthetic oligonucleotide
aacuaccucaggagucacu

SEQ ID NO: 1114 - RNA, 19 nt, Artificial Sequence
  Description of Artificial Sequence: Synthetic oligonucleotide
acuaccucaggagucacug

SEQ ID NO: 1115 - RNA, 19 nt, Artificial Sequence
  Description of Artificial Sequence: Synthetic oligonucleotide
cuaccucaggagucacugu

SEQ ID NO: 1116 - RNA, 19 nt, Artificial Sequence
  Description of Artificial Sequence: Synthetic oligonucleotide
uaccucaggagucacugua

SEQ ID NO: 1117 - RNA, 19 nt, Artificial Sequence
  Description of Artificial Sequence: Synthetic oligonucleotide
accucaggagucacuguaa

SEQ ID NO: 1118 - RNA, 19 nt, Artificial Sequence
  Description of Artificial Sequence: Synthetic oligonucleotide
ccucaggagucacuguaaa

SEQ ID NO: 1119 - RNA, 19 nt, Artificial Sequence
  Description of Artificial Sequence: Synthetic oligonucleotide
cucaggagucacuguaaaa

SEQ ID NO: 1120 - RNA, 19 nt, Artificial Sequence
  Description of Artificial Sequence: Synthetic oligonucleotide
ucaggagucacuguaaaau

SEQ ID NO: 1121 - RNA, 19 nt, Artificial Sequence
  Description of Artificial Sequence: Synthetic oligonucleotide
caggagucacuguaaaaua

SEQ ID NO: 1122 - RNA, 19 nt, Artificial Sequence
  Description of Artificial Sequence: Synthetic oligonucleotide
aggagucacuguaaaauaa

SEQ ID NO: 1123 - RNA, 19 nt, Artificial Sequence
  Description of Artificial Sequence: Synthetic oligonucleotide
ggagucacuguaaaauaaa

SEQ ID NO: 1124 - RNA, 19 nt, Artificial Sequence
  Description of Artificial Sequence: Synthetic oligonucleotide
gagucacuguaaaauaaac

SEQ ID NO: 1125 - RNA, 19 nt, Artificial Sequence
  Description of Artificial Sequence: Synthetic oligonucleotide
agucacuguaaaauaaacu

SEQ ID NO: 1126 - RNA, 19 nt, Artificial Sequence
  Description of Artificial Sequence: Synthetic oligonucleotide
gucacuguaaaauaaacug

SEQ ID NO: 1127 - RNA, 19 nt, Artificial Sequence
  Description of Artificial Sequence: Synthetic oligonucleotide
ucacuguaaaauaaacugg

SEQ ID NO: 1128 - RNA, 19 nt, Artificial Sequence
  Description of Artificial Sequence: Synthetic oligonucleotide
cacuguaaaauaaacuggc

SEQ ID NO: 1129 - RNA, 19 nt, Artificial Sequence
  Description of Artificial Sequence: Synthetic oligonucleotide
acuguaaaauaaacuggcc

SEQ ID NO: 1130 - RNA, 19 nt, Artificial Sequence
  Description of Artificial Sequence: Synthetic oligonucleotide
cuguaaaauaaacuggccu

SEQ ID NO: 1131 - RNA, 19 nt, Artificial Sequence
  Description of Artificial Sequence: Synthetic oligonucleotide
uguaaaauaaacuggccuu

SEQ ID NO: 1132 - RNA, 19 nt, Artificial Sequence
  Description of Artificial Sequence: Synthetic oligonucleotide
guaaaauaaacuggccuug

SEQ ID NO: 1133 - RNA, 19 nt, Artificial Sequence
  Description of Artificial Sequence: Synthetic oligonucleotide
uaaaauaaacuggccuugu

SEQ ID NO: 1134 - RNA, 19 nt, Artificial Sequence
  Description of Artificial Sequence: Synthetic oligonucleotide
aaaauaaacuggccuuguu

SEQ ID NO: 1135 - RNA, 19 nt, Artificial Sequence
  Description of Artificial Sequence: Synthetic oligonucleotide
aaauaaacuggccuuguug

SEQ ID NO: 1136 - RNA, 19 nt, Artificial Sequence
  Description of Artificial Sequence: Synthetic oligonucleotide
aauaaacuggccuuguugu

SEQ ID NO: 1137 - RNA, 19 nt, Artificial Sequence
  Description of Artificial Sequence: Synthetic oligonucleotide
auaaacuggccuuguuguc

SEQ ID NO: 1138 - RNA, 19 nt, Artificial Sequence
  Description of Artificial Sequence: Synthetic oligonucleotide
uaaacuggccuuguugucu

SEQ ID NO: 1139 - RNA, 19 nt, Artificial Sequence
  Description of Artificial Sequence: Synthetic oligonucleotide
aaacuggccuuguugucuu

SEQ ID NO: 1140 - RNA, 19 nt, Artificial Sequence
  Description of Artificial Sequence: Synthetic oligonucleotide
aacuggccuuguugucuua

SEQ ID NO: 1141 - RNA, 19 nt, Artificial Sequence
  Description of Artificial Sequence: Synthetic oligonucleotide
aggcuaccccuaucugcgc

SEQ ID NO: 1142 - RNA, 19 nt, Artificial Sequence
  Description of Artificial Sequence: Synthetic oligonucleotide
caggcuaccccuaucugcg

SEQ ID NO: 1143 - RNA, 19 nt, Artificial Sequence
  Description of Artificial Sequence: Synthetic oligonucleotide
ccaggcuaccccuaucugc

SEQ ID NO: 1144 - RNA, 19 nt, Artificial Sequence
  Description of Artificial Sequence: Synthetic oligonucleotide
uccaggcuaccccuaucug

SEQ ID NO: 1145 - RNA, 19 nt, Artificial Sequence
  Description of Artificial Sequence: Synthetic oligonucleotide
cuccaggcuaccccuaucu

SEQ ID NO: 1146 - RNA, 19 nt, Artificial Sequence
  Description of Artificial Sequence: Synthetic oligonucleotide
ccuccaggcuaccccuauc

SEQ ID NO: 1147 - RNA, 19 nt, Artificial Sequence
  Description of Artificial Sequence: Synthetic oligonucleotide
gccuccaggcuaccccuau

SEQ ID NO: 1148 - RNA, 19 nt, Artificial Sequence
  Description of Artificial Sequence: Synthetic oligonucleotide
ggccuccaggcuaccccua

SEQ ID NO: 1149 - RNA, 19 nt, Artificial Sequence
  Description of Artificial Sequence: Synthetic oligonucleotide
aggccuccaggcuaccccu

SEQ ID NO: 1150 - RNA, 19 nt, Artificial Sequence
  Description of Artificial Sequence: Synthetic oligonucleotide
caggccuccaggcuacccc

SEQ ID NO: 1151 - RNA, 19 nt, Artificial Sequence
  Description of Artificial Sequence: Synthetic oligonucleotide
gcaggccuccaggcuaccc

SEQ ID NO: 1152 - RNA, 19 nt, Artificial Sequence
  Description of Artificial Sequence: Synthetic oligonucleotide
ugcaggccuccaggcuacc

SEQ ID NO: 1153 - RNA, 19 nt, Artificial Sequence
  Description of Artificial Sequence: Synthetic oligonucleotide
cugcaggccuccaggcuac

SEQ ID NO: 1154 - RNA, 19 nt, Artificial Sequence
  Description of Artificial Sequence: Synthetic oligonucleotide
acugcaggccuccaggcua

SEQ ID NO: 1155 - RNA, 19 nt, Artificial Sequence
  Description of Artificial Sequence: Synthetic oligonucleotide
gacugcaggccuccaggcu

SEQ ID NO: 1156 - RNA, 19 nt, Artificial Sequence
  Description of Artificial Sequence: Synthetic oligonucleotide
ggacugcaggccuccaggc

SEQ ID NO: 1157 - RNA, 19 nt, Artificial Sequence
  Description of Artificial Sequence: Synthetic oligonucleotide
cggacugcaggccuccagg

SEQ ID NO: 1158 - RNA, 19 nt, Artificial Sequence
  Description of Artificial Sequence: Synthetic oligonucleotide
gcggacugcaggccuccag

SEQ ID NO: 1159 - RNA, 19 nt, Artificial Sequence
  Description of Artificial Sequence: Synthetic oligonucleotide
cgcggacugcaggccucca

SEQ ID NO: 1160 - RNA, 19 nt, Artificial Sequence
  Description of Artificial Sequence: Synthetic oligonucleotide
gcgcggacugcaggccucc

SEQ ID NO: 1161 - RNA, 19 nt, Artificial Sequence
  Description of Artificial Sequence: Synthetic oligonucleotide
cgcgcggacugcaggccuc

SEQ ID NO: 1162 - RNA, 19 nt, Artificial Sequence
  Description of Artificial Sequence: Synthetic oligonucleotide
ccgcgcggacugcaggccu

SEQ ID NO: 1163 - RNA, 19 nt, Artificial Sequence
  Description of Artificial Sequence: Synthetic oligonucleotide
gccgcgcggacugcaggcc

SEQ ID NO: 1164 - RNA, 19 nt, Artificial Sequence
  Description of Artificial Sequence: Synthetic oligonucleotide
ggccgcgcggacugcaggc

SEQ ID NO: 1165 - RNA, 19 nt, Artificial Sequence
  Description of Artificial Sequence: Synthetic oligonucleotide
cggccgcgcggacugcagg

SEQ ID NO: 1166 - RNA, 19 nt, Artificial Sequence
  Description of Artificial Sequence: Synthetic oligonucleotide
gcggccgcgcggacugcag

SEQ ID NO: 1167 - RNA, 19 nt, Artificial Sequence
  Description of Artificial Sequence: Synthetic oligonucleotide
cgcggccgcgcggacugca

SEQ ID NO: 1168 - RNA, 19 nt, Artificial Sequence
  Description of Artificial Sequence: Synthetic oligonucleotide
ccgcggccgcgcggacugc

SEQ ID NO: 1169 - RNA, 19 nt, Artificial Sequence
  Description of Artificial Sequence: Synthetic oligonucleotide
cccgcggccgcgcggacug

SEQ ID NO: 1170 - RNA, 19 nt, Artificial Sequence
  Description of Artificial Sequence: Synthetic oligonucleotide
ccccgcggccgcgcggacu

SEQ ID NO: 1171 - RNA, 19 nt, Artificial Sequence
  Description of Artificial Sequence: Synthetic oligonucleotide
uccccgcggccgcgcggac

SEQ ID NO: 1172 - RNA, 19 nt, Artificial Sequence
  Description of Artificial Sequence: Synthetic oligonucleotide
cuccccgcggccgcgcgga

SEQ ID NO: 1173 - RNA, 19 nt, Artificial Sequence
  Description of Artificial Sequence: Synthetic oligonucleotide
ccuccccgcggccgcgcgg

SEQ ID NO: 1174 - RNA, 19 nt, Artificial Sequence
  Description of Artificial Sequence: Synthetic oligonucleotide
cccuccccgcggccgcgcg

SEQ ID NO: 1175 - RNA, 19 nt, Artificial Sequence
  Description of Artificial Sequence: Synthetic oligonucleotide
ucccuccccgcggccgcgc

SEQ ID NO: 1176 - RNA, 19 nt, Artificial Sequence
  Description of Artificial Sequence: Synthetic oligonucleotide
gucccuccccgcggccgcg

SEQ ID NO: 1177 - RNA, 19 nt, Artificial Sequence
  Description of Artificial Sequence: Synthetic oligonucleotide
cgucccuccccgcggccgc

SEQ ID NO: 1178 - RNA, 19 nt, Artificial Sequence
  Description of Artificial Sequence: Synthetic oligonucleotide
ucgucccuccccgcggccg

SEQ ID NO: 1179 - RNA, 19 nt, Artificial Sequence
  Description of Artificial Sequence: Synthetic oligonucleotide
cucgucccuccccgcggcc

SEQ ID NO: 1180 - RNA, 19 nt, Artificial Sequence
  Description of Artificial Sequence: Synthetic oligonucleotide
ucucgucccuccccgcggc

SEQ ID NO: 1181 - RNA, 19 nt, Artificial Sequence
  Description of Artificial Sequence: Synthetic oligonucleotide
cucucgucccuccccgcgg

SEQ ID NO: 1182 - RNA, 19 nt, Artificial Sequence
  Description of Artificial Sequence: Synthetic oligonucleotide
ccucucgucccuccccgcg

SEQ ID NO: 1183 - RNA, 19 nt, Artificial Sequence
  Description of Artificial Sequence: Synthetic oligonucleotide
cccucucgucccuccccgc

SEQ ID NO: 1184 - RNA, 19 nt, Artificial Sequence
  Description of Artificial Sequence: Synthetic oligonucleotide
gcccucucgucccuccccg

SEQ ID NO: 1185 - RNA, 19 nt, Artificial Sequence
  Description of Artificial Sequence: Synthetic oligonucleotide
ggcccucucgucccucccc

SEQ ID NO: 1186 - RNA, 19 nt, Artificial Sequence
  Description of Artificial Sequence: Synthetic oligonucleotide
aggcccucucgucccuccc

SEQ ID NO: 1187 - RNA, 19 nt, Artificial Sequence
  Description of Artificial Sequence: Synthetic oligonucleotide
caggcccucucgucccucc

SEQ ID NO: 1188 - RNA, 19 nt, Artificial Sequence
  Description of Artificial Sequence: Synthetic oligonucleotide
ucaggcccucucgucccuc

SEQ ID NO: 1189 - RNA, 19 nt, Artificial Sequence
  Description of Artificial Sequence: Synthetic oligonucleotide
gucaggcccucucgucccu

SEQ ID NO: 1190 - RNA, 19 nt, Artificial Sequence
  Description of Artificial Sequence: Synthetic oligonucleotide
cgucaggcccucucguccc

SEQ ID NO: 1191 - RNA, 19 nt, Artificial Sequence
  Description of Artificial Sequence: Synthetic oligonucleotide
acgucaggcccucucgucc

SEQ ID NO: 1192 - RNA, 19 nt, Artificial Sequence
  Description of Artificial Sequence: Synthetic oligonucleotide
uacgucaggcccucucguc

SEQ ID NO: 1193 - RNA, 19 nt, Artificial Sequence
  Description of Artificial Sequence: Synthetic oligonucleotide
guacgucaggcccucucgu

SEQ ID NO: 1194 - RNA, 19 nt, Artificial Sequence
  Description of Artificial Sequence: Synthetic oligonucleotide
uguacgucaggcccucucg

SEQ ID NO: 1195 - RNA, 19 nt, Artificial Sequence
  Description of Artificial Sequence: Synthetic oligonucleotide
cuguacgucaggcccucuc

SEQ ID NO: 1196 - RNA, 19 nt, Artificial Sequence
  Description of Artificial Sequence: Synthetic oligonucleotide
ucuguacgucaggcccucu

SEQ ID NO: 1197 - RNA, 19 nt, Artificial Sequence
  Description of Artificial Sequence: Synthetic oligonucleotide
aucuguacgucaggcccuc

SEQ ID NO: 1198 - RNA, 19 nt, Artificial Sequence
  Description of Artificial Sequence: Synthetic oligonucleotide
aaucuguacgucaggcccu

SEQ ID NO: 1199 - RNA, 19 nt, Artificial Sequence
  Description of Artificial Sequence: Synthetic oligonucleotide
uaaucuguacgucaggccc

SEQ ID NO: 1200 - RNA, 19 nt, Artificial Sequence
  Description of Artificial Sequence: Synthetic oligonucleotide
auaaucuguacgucaggcc

SEQ ID NO: 1201 - RNA, 19 nt, Artificial Sequence
  Description of Artificial Sequence: Synthetic oligonucleotide
uauaaucuguacgucaggc

SEQ ID NO: 1202 - RNA, 19 nt, Artificial Sequence
  Description of Artificial Sequence: Synthetic oligonucleotide
uuauaaucuguacgucagg

SEQ ID NO: 1203 - RNA, 19 nt, Artificial Sequence
  Description of Artificial Sequence: Synthetic oligonucleotide
cuuauaaucuguacgucag

SEQ ID NO: 1204 - RNA, 19 nt, Artificial Sequence
  Description of Artificial Sequence: Synthetic oligonucleotide
gcuuauaaucuguacguca

SEQ ID NO: 1205 - RNA, 19 nt, Artificial Sequence
  Description of Artificial Sequence: Synthetic oligonucleotide
cgcuuauaaucuguacguc

SEQ ID NO: 1206 - RNA, 19 nt, Artificial Sequence
  Description of Artificial Sequence: Synthetic oligonucleotide
gcgcuuauaaucuguacgu

SEQ ID NO: 1207 - RNA, 19 nt, Artificial Sequence
  Description of Artificial Sequence: Synthetic oligonucleotide
ggcgcuuauaaucuguacg

SEQ ID NO: 1208 - RNA, 19 nt, Artificial Sequence
  Description of Artificial Sequence: Synthetic oligonucleotide
uggcgcuuauaaucuguac

SEQ ID NO: 1209 - RNA, 19 nt, Artificial Sequence
  Description of Artificial Sequence: Synthetic oligonucleotide
auggcgcuuauaaucugua

SEQ ID NO: 1210 - RNA, 19 nt, Artificial Sequence
  Description of Artificial Sequence: Synthetic oligonucleotide
cauggcgcuuauaaucugu

SEQ ID NO: 1211 - RNA, 19 nt, Artificial Sequence
  Description of Artificial Sequence: Synthetic oligonucleotide
ccauggcgcuuauaaucug

SEQ ID NO: 1212 - RNA, 19 nt, Artificial Sequence
  Description of Artificial Sequence: Synthetic oligonucleotide
gccauggcgcuuauaaucu

SEQ ID NO: 1213 - RNA, 19 nt, Artificial Sequence
  Description of Artificial Sequence: Synthetic oligonucleotide
agccauggcgcuuauaauc

SEQ ID NO: 1214 - RNA, 19 nt, Artificial Sequence
  Description of Artificial Sequence: Synthetic oligonucleotide
uagccauggcgcuuauaau

SEQ ID NO: 1215 - RNA, 19 nt, Artificial Sequence
  Description of Artificial Sequence: Synthetic oligonucleotide
auagccauggcgcuuauaa

SEQ ID NO: 1216 - RNA, 19 nt, Artificial Sequence
  Description of Artificial Sequence: Synthetic oligonucleotide
cauagccauggcgcuuaua

SEQ ID NO: 1217 - RNA, 19 nt, Artificial Sequence
  Description of Artificial Sequence: Synthetic oligonucleotide
ccauagccauggcgcuuau

SEQ ID NO: 1218 - RNA, 19 nt, Artificial Sequence
  Description of Artificial Sequence: Synthetic oligonucleotide
gccauagccauggcgcuua

SEQ ID NO: 1219 - RNA, 19 nt, Artificial Sequence
  Description of Artificial Sequence: Synthetic oligonucleotide
agccauagccauggcgcuu

SEQ ID NO: 1220 - RNA, 19 nt, Artificial Sequence
  Description of Artificial Sequence: Synthetic oligonucleotide
uagccauagccauggcgcu

SEQ ID NO: 1221 - RNA, 19 nt, Artificial Sequence
  Description of Artificial Sequence: Synthetic oligonucleotide
cuagccauagccauggcgc

SEQ ID NO: 1222 - RNA, 19 nt, Artificial Sequence
  Description of Artificial Sequence: Synthetic oligonucleotide
acuagccauagccauggcg

SEQ ID NO: 1223 - RNA, 19 nt, Artificial Sequence
  Description of Artificial Sequence: Synthetic oligonucleotide
cacuagccauagccauggc

SEQ ID NO: 1224 - RNA, 19 nt, Artificial Sequence
  Description of Artificial Sequence: Synthetic oligonucleotide
acacuagccauagccaugg

SEQ ID NO: 1225 - RNA, 19 nt, Artificial Sequence
  Description of Artificial Sequence: Synthetic oligonucleotide
aacacuagccauagccaug

SEQ ID NO: 1226 - RNA, 19 nt, Artificial Sequence
  Description of Artificial Sequence: Synthetic oligonucleotide
uaacacuagccauagccau

SEQ ID NO: 1227 - RNA, 19 nt, Artificial Sequence
  Description of Artificial Sequence: Synthetic oligonucleotide
uuaacacuagccauagcca

SEQ ID NO: 1228 - RNA, 19 nt, Artificial Sequence
  Description of Artificial Sequence: Synthetic oligonucleotide
uuuaacacuagccauagcc

SEQ ID NO: 1229 - RNA, 19 nt, Artificial Sequence
  Description of Artificial Sequence: Synthetic oligonucleotide
auuuaacacuagccauagc

SEQ ID NO: 1230 - RNA, 19 nt, Artificial Sequence
  Description of Artificial Sequence: Synthetic oligonucleotide
aauuuaacacuagccauag

SEQ ID NO: 1231 - RNA, 19 nt, Artificial Sequence
  Description of Artificial Sequence: Synthetic oligonucleotide
caauuuaacacuagccaua

SEQ ID NO: 1232 - RNA, 19 nt, Artificial Sequence
  Description of Artificial Sequence: Synthetic oligonucleotide
gcaauuuaacacuagccau

SEQ ID NO: 1233 - RNA, 19 nt, Artificial Sequence
  Description of Artificial Sequence: Synthetic oligonucleotide
agcaauuuaacacuagcca

SEQ ID NO: 1234 - RNA, 19 nt, Artificial Sequence
  Description of Artificial Sequence: Synthetic oligonucleotide
aagcaauuuaacacuagcc

SEQ ID NO: 1235 - RNA, 19 nt, Artificial Sequence
  Description of Artificial Sequence: Synthetic oligonucleotide
caagcaauuuaacacuagc

SEQ ID NO: 1236 - RNA, 19 nt, Artificial Sequence
  Description of Artificial Sequence: Synthetic oligonucleotide
gcaagcaauuuaacacuag

SEQ ID NO: 1237 - RNA, 19 nt, Artificial Sequence
  Description of Artificial Sequence: Synthetic oligonucleotide
ggcaagcaauuuaacacua

SEQ ID NO: 1238 - RNA, 19 nt, Artificial Sequence
  Description of Artificial Sequence: Synthetic oligonucleotide
cggcaagcaauuuaacacu

SEQ ID NO: 1239 - RNA, 19 nt, Artificial Sequence
  Description of Artificial Sequence: Synthetic oligonucleotide
ccggcaagcaauuuaacac

SEQ ID NO: 1240 - RNA, 19 nt, Artificial Sequence
  Description of Artificial Sequence: Synthetic oligonucleotide
accggcaagcaauuuaaca

SEQ ID NO: 1241 - RNA, 19 nt, Artificial Sequence
  Description of Artificial Sequence: Synthetic oligonucleotide
caccggcaagcaauuuaac

SEQ ID NO: 1242 - RNA, 19 nt, Artificial Sequence
  Description of Artificial Sequence: Synthetic oligonucleotide
acaccggcaagcaauuuaa

SEQ ID NO: 1243 - RNA, 19 nt, Artificial Sequence
  Description of Artificial Sequence: Synthetic oligonucleotide
aacaccggcaagcaauuua

SEQ ID NO: 1244 - RNA, 19 nt, Artificial Sequence
  Description of Artificial Sequence: Synthetic oligonucleotide
aaacaccggcaagcaauuu

SEQ ID NO: 1245 - RNA, 19 nt, Artificial Sequence
  Description of Artificial Sequence: Synthetic oligonucleotide
aaaacaccggcaagcaauu

SEQ ID NO: 1246 - RNA, 19 nt, Artificial Sequence
  Description of Artificial Sequence: Synthetic oligonucleotide
uaaaacaccggcaagcaau

SEQ ID NO: 1247 - RNA, 19 nt, Artificial Sequence
  Description of Artificial Sequence: Synthetic oligonucleotide
uuaaaacaccggcaagcaa

SEQ ID NO: 1248 - RNA, 19 nt, Artificial Sequence
  Description of Artificial Sequence: Synthetic oligonucleotide
cuuaaaacaccggcaagca

SEQ ID NO: 1249 - RNA, 19 nt, Artificial Sequence
  Description of Artificial Sequence: Synthetic oligonucleotide
ucuuaaaacaccggcaagc

SEQ ID NO: 1250 - RNA, 19 nt, Artificial Sequence
  Description of Artificial Sequence: Synthetic oligonucleotide
uucuuaaaacaccggcaag

SEQ ID NO: 1251 - RNA, 19 nt, Artificial Sequence
  Description of Artificial Sequence: Synthetic oligonucleotide
uuucuuaaaacaccggcaa

SEQ ID NO: 1252 - RNA, 19 nt, Artificial Sequence
  Description of Artificial Sequence: Synthetic oligonucleotide
cuuucuuaaaacaccggca

SEQ ID NO: 1253 - RNA, 19 nt, Artificial Sequence
  Description of Artificial Sequence: Synthetic oligonucleotide
gcuuucuuaaaacaccggc

SEQ ID NO: 1254 - RNA, 19 nt, Artificial Sequence
  Description of Artificial Sequence: Synthetic oligonucleotide
ggcuuucuuaaaacaccgg

SEQ ID NO: 1255 - RNA, 19 nt, Artificial Sequence
  Description of Artificial Sequence: Synthetic oligonucleotide
uggcuuucuuaaaacaccg

SEQ ID NO: 1256 - RNA, 19 nt, Artificial Sequence
  Description of Artificial Sequence: Synthetic oligonucleotide
cuggcuuucuuaaaacacc

SEQ ID NO: 1257 - RNA, 19 nt, Artificial Sequence
  Description of Artificial Sequence: Synthetic oligonucleotide
ucuggcuuucuuaaaacac

SEQ ID NO: 1258 - RNA, 19 nt, Artificial Sequence
  Description of Artificial Sequence: Synthetic oligonucleotide
aucuggcuuucuuaaaaca

SEQ ID NO: 1259 - RNA, 19 nt, Artificial Sequence
  Description of Artificial Sequence: Synthetic oligonucleotide
caucuggcuuucuuaaaac

SEQ ID NO: 1260 - RNA, 19 nt, Artificial Sequence
  Description of Artificial Sequence: Synthetic oligonucleotide
gcaucuggcuuucuuaaaa

SEQ ID NO: 1261 - RNA, 19 nt, Artificial Sequence
  Description of Artificial Sequence: Synthetic oligonucleotide
ggcaucuggcuuucuuaaa

SEQ ID NO: 1262 - RNA, 19 nt, Artificial Sequence
  Description of Artificial Sequence: Synthetic oligonucleotide
aggcaucuggcuuucuuaa

SEQ ID NO: 1263 - RNA, 19 nt, Artificial Sequence
  Description of Artificial Sequence: Synthetic oligonucleotide
caggcaucuggcuuucuua

SEQ ID NO: 1264 - RNA, 19 nt, Artificial Sequence
  Description of Artificial Sequence: Synthetic oligonucleotide
ccaggcaucuggcuuucuu

SEQ ID NO: 1265 - RNA, 19 nt, Artificial Sequence
  Description of Artificial Sequence: Synthetic oligonucleotide
uccaggcaucuggcuuucu

SEQ ID NO: 1266 - RNA, 19 nt, Artificial Sequence
  Description of Artificial Sequence: Synthetic oligonucleotide
auccaggcaucuggcuuuc

SEQ ID NO: 1267 - RNA, 19 nt, Artificial Sequence
  Description of Artificial Sequence: Synthetic oligonucleotide
aauccaggcaucuggcuuu

SEQ ID NO: 1268 - RNA, 19 nt, Artificial Sequence
  Description of Artificial Sequence: Synthetic oligonucleotide
caauccaggcaucuggcuu

SEQ ID NO: 1269 - RNA, 19 nt, Artificial Sequence
  Description of Artificial Sequence: Synthetic oligonucleotide
ccaauccaggcaucuggcu

SEQ ID NO: 1270 - RNA, 19 nt, Artificial Sequence
  Description of Artificial Sequence: Synthetic oligonucleotide
uccaauccaggcaucuggc

SEQ ID NO: 1271 - RNA, 19 nt, Artificial Sequence
  Description of Artificial Sequence: Synthetic oligonucleotide
guccaauccaggcaucugg

SEQ ID NO: 1272 - RNA, 19 nt, Artificial Sequence
  Description of Artificial Sequence: Synthetic oligonucleotide
aguccaauccaggcaucug

SEQ ID NO: 1273 - RNA, 19 nt, Artificial Sequence
  Description of Artificial Sequence: Synthetic oligonucleotide
gaguccaauccaggcaucu

SEQ ID NO: 1274 - RNA, 19 nt, Artificial Sequence
  Description of Artificial Sequence: Synthetic oligonucleotide
agaguccaauccaggcauc

SEQ ID NO: 1275 - RNA, 19 nt, Artificial Sequence
  Description of Artificial Sequence: Synthetic oligonucleotide
cagaguccaauccaggcau

SEQ ID NO: 1276 - RNA, 19 nt, Artificial Sequence
  Description of Artificial Sequence: Synthetic oligonucleotide
ccagaguccaauccaggca

SEQ ID NO: 1277 - RNA, 19 nt, Artificial Sequence
  Description of Artificial Sequence: Synthetic oligonucleotide
cccagaguccaauccaggc

SEQ ID NO: 1278 - RNA, 19 nt, Artificial Sequence
  Description of Artificial Sequence: Synthetic oligonucleotide
ccccagaguccaauccagg

SEQ ID NO: 1279 - RNA, 19 nt, Artificial Sequence
  Description of Artificial Sequence: Synthetic oligonucleotide
accccagaguccaauccag

SEQ ID NO: 1280 - RNA, 19 nt, Artificial Sequence
  Description of Artificial Sequence: Synthetic oligonucleotide
caccccagaguccaaucca

SEQ ID NO: 1281 - RNA, 19 nt, Artificial Sequence
  Description of Artificial Sequence: Synthetic oligonucleotide
acaccccagaguccaaucc

SEQ ID NO: 1282 - RNA, 19 nt, Artificial Sequence
  Description of Artificial Sequence: Synthetic oligonucleotide
aacaccccagaguccaauc

SEQ ID NO: 1283 - RNA, 19 nt, Artificial Sequence
  Description of Artificial Sequence: Synthetic oligonucleotide
gaacaccccagaguccaau

SEQ ID NO: 1284 - RNA, 19 nt, Artificial Sequence
  Description of Artificial Sequence: Synthetic oligonucleotide
agaacaccccagaguccaa

SEQ ID NO: 1285 - RNA, 19 nt, Artificial Sequence
  Description of Artificial Sequence: Synthetic oligonucleotide
gagaacaccccagagucca

SEQ ID NO: 1286 - RNA, 19 nt, Artificial Sequence
  Description of Artificial Sequence: Synthetic oligonucleotide
ggagaacaccccagagucc

SEQ ID NO: 1287 - RNA, 19 nt, Artificial Sequence
  Description of Artificial Sequence: Synthetic oligonucleotide
cggagaacaccccagaguc

SEQ ID NO: 1288 - RNA, 19 nt, Artificial Sequence
  Description of Artificial Sequence: Synthetic oligonucleotide
ucggagaacaccccagagu

SEQ ID NO: 1289 - RNA, 19 nt, Artificial Sequence
  Description of Artificial Sequence: Synthetic oligonucleotide
cucggagaacaccccagag

SEQ ID NO: 1290 - RNA, 19 nt, Artificial Sequence
  Description of Artificial Sequence: Synthetic oligonucleotide
ccucggagaacaccccaga

SEQ ID NO: 1291 - RNA, 19 nt, Artificial Sequence
  Description of Artificial Sequence: Synthetic oligonucleotide
cccucggagaacaccccag

SEQ ID NO: 1292 - RNA, 19 nt, Artificial Sequence
  Description of Artificial Sequence: Synthetic oligonucleotide
ucccucggagaacacccca

SEQ ID NO: 1293 - RNA, 19 nt, Artificial Sequence
  Description of Artificial Sequence: Synthetic oligonucleotide
gucccucggagaacacccc

SEQ ID NO: 1294 - RNA, 19 nt, Artificial Sequence
  Description of Artificial Sequence: Synthetic oligonucleotide
ugucccucggagaacaccc

SEQ ID NO: 1295 - RNA, 19 nt, Artificial Sequence
  Description of Artificial Sequence: Synthetic oligonucleotide
gugucccucggagaacacc

SEQ ID NO: 1296 - RNA, 19 nt, Artificial Sequence
  Description of Artificial Sequence: Synthetic oligonucleotide
ggugucccucggagaacac

SEQ ID NO: 1297 - RNA, 19 nt, Artificial Sequence
  Description of Artificial Sequence: Synthetic oligonucleotide
aggugucccucggagaaca

SEQ ID NO: 1298 - RNA, 19 nt, Artificial Sequence
  Description of Artificial Sequence: Synthetic oligonucleotide
aaggugucccucggagaac

SEQ ID NO: 1299 - RNA, 19 nt, Artificial Sequence
  Description of Artificial Sequence: Synthetic oligonucleotide
gaaggugucccucggagaa

SEQ ID NO: 1300 - RNA, 19 nt, Artificial Sequence
  Description of Artificial Sequence: Synthetic oligonucleotide
ugaaggugucccucggaga

SEQ ID NO: 1301 - RNA, 19 nt, Artificial Sequence
  Description of Artificial Sequence: Synthetic oligonucleotide
augaaggugucccucggag

SEQ ID NO: 1302 - RNA, 19 nt, Artificial Sequence
  Description of Artificial Sequence: Synthetic oligonucleotide
gaugaaggugucccucgga

SEQ ID NO: 1303 - RNA, 19 nt, Artificial Sequence
  Description of Artificial Sequence: Synthetic oligonucleotide
ugaugaaggugucccucgg

SEQ ID NO: 1304 - RNA, 19 nt, Artificial Sequence
  Description of Artificial Sequence: Synthetic oligonucleotide
augaugaaggugucccucg

SEQ ID NO: 1305 - RNA, 19 nt, Artificial Sequence
  Description of Artificial Sequence: Synthetic oligonucleotide
uaugaugaaggugucccuc

SEQ ID NO: 1306 - RNA, 19 nt, Artificial Sequence
  Description of Artificial Sequence: Synthetic oligonucleotide
guaugaugaaggugucccu

SEQ ID NO: 1307 - RNA, 19 nt, Artificial Sequence
  Description of Artificial Sequence: Synthetic oligonucleotide
uguaugaugaagguguccc

SEQ ID NO: 1308 - RNA, 19 nt, Artificial Sequence
  Description of Artificial Sequence: Synthetic oligonucleotide
uuguaugaugaaggugucc

SEQ ID NO: 1309 - RNA, 19 nt, Artificial Sequence
  Description of Artificial Sequence: Synthetic oligonucleotide
uuuguaugaugaagguguc

SEQ ID NO: 1310 - RNA, 19 nt, Artificial Sequence
  Description of Artificial Sequence: Synthetic oligonucleotide
guuuguaugaugaaggugu

SEQ ID NO: 1311 - RNA, 19 nt, Artificial Sequence
  Description of Artificial Sequence: Synthetic oligonucleotide
aguuuguaugaugaaggug

SEQ ID NO: 1312 - RNA, 19 nt, Artificial Sequence
  Description of Artificial Sequence: Synthetic oligonucleotide
gaguuuguaugaugaaggu

SEQ ID NO: 1313 - RNA, 19 nt, Artificial Sequence
  Description of Artificial Sequence: Synthetic oligonucleotide
agaguuuguaugaugaagg

SEQ ID NO: 1314 - RNA, 19 nt, Artificial Sequence
  Description of Artificial Sequence: Synthetic oligonucleotide
cagaguuuguaugaugaag

SEQ ID NO: 1315 - RNA, 19 nt, Artificial Sequence
  Description of Artificial Sequence: Synthetic oligonucleotide
acagaguuuguaugaugaa

SEQ ID NO: 1316 - RNA, 19 nt, Artificial Sequence
  Description of Artificial Sequence: Synthetic oligonucleotide
uacagaguuuguaugauga

SEQ ID NO: 1317 - RNA, 19 nt, Artificial Sequence
  Description of Artificial Sequence: Synthetic oligonucleotide
guacagaguuuguaugaug

SEQ ID NO: 1318 - RNA, 19 nt, Artificial Sequence
  Description of Artificial Sequence: Synthetic oligonucleotide
aguacagaguuuguaugau

SEQ ID NO: 1319 - RNA, 19 nt, Artificial Sequence
  Description of Artificial Sequence: Synthetic oligonucleotide
aaguacagaguuuguauga

SEQ ID NO: 1320 - RNA, 19 nt, Artificial Sequence
  Description of Artificial Sequence: Synthetic oligonucleotide
gaaguacagaguuuguaug

SEQ ID NO: 1321 - RNA, 19 nt, Artificial Sequence
  Description of Artificial Sequence: Synthetic oligonucleotide
ggaaguacagaguuuguau

SEQ ID NO: 1322 - RNA, 19 nt, Artificial Sequence
  Description of Artificial Sequence: Synthetic oligonucleotide
aggaaguacagaguuugua

SEQ ID NO: 1323 - RNA, 19 nt, Artificial Sequence
  Description of Artificial Sequence: Synthetic oligonucleotide
caggaaguacagaguuugu

SEQ ID NO: 1324 - RNA, 19 nt, Artificial Sequence
  Description of Artificial Sequence: Synthetic oligonucleotide
ccaggaaguacagaguuug

SEQ ID NO: 1325 - RNA, 19 nt, Artificial Sequence
  Description of Artificial Sequence: Synthetic oligonucleotide
uccaggaaguacagaguuu

SEQ ID NO: 1326 - RNA, 19 nt, Artificial Sequence
  Description of Artificial Sequence: Synthetic oligonucleotide
uuccaggaaguacagaguu

SEQ ID NO: 1327 - RNA, 19 nt, Artificial Sequence
  Description of Artificial Sequence: Synthetic oligonucleotide
auuccaggaaguacagagu

SEQ ID NO: 1328 - RNA, 19 nt, Artificial Sequence
  Description of Artificial Sequence: Synthetic oligonucleotide
gauuccaggaaguacagag

SEQ ID NO: 1329 - RNA, 19 nt, Artificial Sequence
  Description of Artificial Sequence: Synthetic oligonucleotide
cgauuccaggaaguacaga

SEQ ID NO: 1330 - RNA, 19 nt, Artificial Sequence
  Description of Artificial Sequence: Synthetic oligonucleotide
ucgauuccaggaaguacag

SEQ ID NO: 1331 - RNA, 19 nt, Artificial Sequence
  Description of Artificial Sequence: Synthetic oligonucleotide
aucgauuccaggaaguaca

SEQ ID NO: 1332 - RNA, 19 nt, Artificial Sequence
  Description of Artificial Sequence: Synthetic oligonucleotide
uaucgauuccaggaaguac

SEQ ID NO: 1333 - RNA, 19 nt, Artificial Sequence
  Description of Artificial Sequence: Synthetic oligonucleotide
guaucgauuccaggaagua

SEQ ID NO: 1334 - RNA, 19 nt, Artificial Sequence
  Description of Artificial Sequence: Synthetic oligonucleotide
aguaucgauuccaggaagu

SEQ ID NO: 1335 - RNA, 19 nt, Artificial Sequence
  Description of Artificial Sequence: Synthetic oligonucleotide
aaguaucgauuccaggaag

SEQ ID NO: 1336 - RNA, 19 nt, Artificial Sequence
  Description of Artificial Sequence: Synthetic oligonucleotide
caaguaucgauuccaggaa

SEQ ID NO: 1337 - RNA, 19 nt, Artificial Sequence
  Description of Artificial Sequence: Synthetic oligonucleotide
acaaguaucgauuccagga

SEQ ID NO: 1338 - RNA, 19 nt, Artificial Sequence
  Description of Artificial Sequence: Synthetic oligonucleotide
uacaaguaucgauuccagg

SEQ ID NO: 1339 - RNA, 19 nt, Artificial Sequence
  Description of Artificial Sequence: Synthetic oligonucleotide
auacaaguaucgauuccag

SEQ ID NO: 1340 - RNA, 19 nt, Artificial Sequence
  Description of Artificial Sequence: Synthetic oligonucleotide
aauacaaguaucgauucca

SEQ ID NO: 1341 - RNA, 19 nt, Artificial Sequence
  Description of Artificial Sequence: Synthetic oligonucleotide
aaauacaaguaucgauucc

SEQ ID NO: 1342 - RNA, 19 nt, Artificial Sequence
  Description of Artificial Sequence: Synthetic oligonucleotide
aaaauacaaguaucgauuc

SEQ ID NO: 1343 - RNA, 19 nt, Artificial Sequence
  Description of Artificial Sequence: Synthetic oligonucleotide
aaaaauacaaguaucgauu

SEQ ID NO: 1344 - RNA, 19 nt, Artificial Sequence
  Description of Artificial Sequence: Synthetic oligonucleotide
gaaaaauacaaguaucgau

SEQ ID NO: 1345 - RNA, 19 nt, Artificial Sequence
  Description of Artificial Sequence: Synthetic oligonucleotide
agaaaaauacaaguaucga

SEQ ID NO: 1346 - RNA, 19 nt, Artificial Sequence
  Description of Artificial Sequence: Synthetic oligonucleotide
uagaaaaauacaaguaucg

SEQ ID NO: 1347 - RNA, 19 nt, Artificial Sequence
  Description of Artificial Sequence: Synthetic oligonucleotide
cuagaaaaauacaaguauc

SEQ ID NO: 1348 - RNA, 19 nt, Artificial Sequence
  Description of Artificial Sequence: Synthetic oligonucleotide
acuagaaaaauacaaguau

SEQ ID NO: 1349 - RNA, 19 nt, Artificial Sequence
  Description of Artificial Sequence: Synthetic oligonucleotide
uacuagaaaaauacaagua

SEQ ID NO: 1350 - RNA, 19 nt, Artificial Sequence
  Description of Artificial Sequence: Synthetic oligonucleotide
guacuagaaaaauacaagu

SEQ ID NO: 1351 - RNA, 19 nt, Artificial Sequence
  Description of Artificial Sequence: Synthetic oligonucleotide
gguacuagaaaaauacaag

SEQ ID NO: 1352 - RNA, 19 nt, Artificial Sequence
  Description of Artificial Sequence: Synthetic oligonucleotide
ugguacuagaaaaauacaa

SEQ ID NO: 1353 - RNA, 19 nt, Artificial Sequence
  Description of Artificial Sequence: Synthetic oligonucleotide
uugguacuagaaaaauaca

SEQ ID NO: 1354 - RNA, 19 nt, Artificial Sequence
  Description of Artificial Sequence: Synthetic oligonucleotide
cuugguacuagaaaaauac

SEQ ID NO: 1355 - RNA, 19 nt, Artificial Sequence
  Description of Artificial Sequence: Synthetic oligonucleotide
acuugguacuagaaaaaua

SEQ ID NO: 1356 - RNA, 19 nt, Artificial Sequence
  Description of Artificial Sequence: Synthetic oligonucleotide
aacuugguacuagaaaaau

SEQ ID NO: 1357 - RNA, 19 nt, Artificial Sequence
  Description of Artificial Sequence: Synthetic oligonucleotide
uaacuugguacuagaaaaa

SEQ ID NO: 1358 - RNA, 19 nt, Artificial Sequence
  Description of Artificial Sequence: Synthetic oligonucleotide
guaacuugguacuagaaaa

SEQ ID NO: 1359 - RNA, 19 nt, Artificial Sequence
  Description of Artificial Sequence: Synthetic oligonucleotide
cguaacuugguacuagaaa

SEQ ID NO: 1360 - RNA, 19 nt, Artificial Sequence
  Description of Artificial Sequence: Synthetic oligonucleotide
acguaacuugguacuagaa

SEQ ID NO: 1361 - RNA, 19 nt, Artificial Sequence
  Description of Artificial Sequence: Synthetic oligonucleotide
cacguaacuugguacuaga

SEQ ID NO: 1362 - RNA, 19 nt, Artificial Sequence
  Description of Artificial Sequence: Synthetic oligonucleotide
gcacguaacuugguacuag

SEQ ID NO: 1363 - RNA, 19 nt, Artificial Sequence
  Description of Artificial Sequence: Synthetic oligonucleotide
ugcacguaacuugguacua

SEQ ID NO: 1364 - RNA, 19 nt, Artificial Sequence
  Description of Artificial Sequence: Synthetic oligonucleotide
gugcacguaacuugguacu

SEQ ID NO: 1365 - RNA, 19 nt, Artificial Sequence
  Description of Artificial Sequence: Synthetic oligonucleotide
ggugcacguaacuugguac

SEQ ID NO: 1366 - RNA, 19 nt, Artificial Sequence
  Description of Artificial Sequence: Synthetic oligonucleotide
uggugcacguaacuuggua

SEQ ID NO: 1367 - RNA, 19 nt, Artificial Sequence
  Description of Artificial Sequence: Synthetic oligonucleotide
uuggugcacguaacuuggu

SEQ ID NO: 1368 - RNA, 19 nt, Artificial Sequence
  Description of Artificial Sequence: Synthetic oligonucleotide
uuuggugcacguaacuugg

SEQ ID NO: 1369 - RNA, 19 nt, Artificial Sequence
  Description of Artificial Sequence: Synthetic oligonucleotide
auuuggugcacguaacuug

SEQ ID NO: 1370 - RNA, 19 nt, Artificial Sequence
  Description of Artificial Sequence: Synthetic oligonucleotide
aauuuggugcacguaacuu

SEQ ID NO: 1371 - RNA, 19 nt, Artificial Sequence
  Description of Artificial Sequence: Synthetic oligonucleotide
uaauuuggugcacguaacu

SEQ ID NO: 1372 - RNA, 19 nt, Artificial Sequence
  Description of Artificial Sequence: Synthetic oligonucleotide
auaauuuggugcacguaac

SEQ ID NO: 1373 - RNA, 19 nt, Artificial Sequence
  Description of Artificial Sequence: Synthetic oligonucleotide
uauaauuuggugcacguaa

SEQ ID NO: 1374 - RNA, 19 nt, Artificial Sequence
  Description of Artificial Sequence: Synthetic oligonucleotide
uuauaauuuggugcacgua

SEQ ID NO: 1375 - RNA, 19 nt, Artificial Sequence
  Description of Artificial Sequence: Synthetic oligonucleotide
uuuauaauuuggugcacgu

SEQ ID NO: 1376 - RNA, 19 nt, Artificial Sequence
  Description of Artificial Sequence: Synthetic oligonucleotide
uuuuauaauuuggugcacg

SEQ ID NO: 1377 - RNA, 19 nt, Artificial Sequence
  Description of Artificial Sequence: Synthetic oligonucleotide
guuuuauaauuuggugcac

SEQ ID NO: 1378 - RNA, 19 nt, Artificial Sequence
  Description of Artificial Sequence: Synthetic oligonucleotide
uguuuuauaauuuggugca

SEQ ID NO: 1379 - RNA, 19 nt, Artificial Sequence
  Description of Artificial Sequence: Synthetic oligonucleotide
guguuuuauaauuuggugc

SEQ ID NO: 1380 - RNA, 19 nt, Artificial Sequence
  Description of Artificial Sequence: Synthetic oligonucleotide
aguguuuuauaauuuggug

SEQ ID NO: 1381 - RNA, 19 nt, Artificial Sequence
  Description of Artificial Sequence: Synthetic oligonucleotide
aaguguuuuauaauuuggu

SEQ ID NO: 1382 - RNA, 19 nt, Artificial Sequence
  Description of Artificial Sequence: Synthetic oligonucleotide
aaaguguuuuauaauuugg

SEQ ID NO: 1383 - RNA, 19 nt, Artificial Sequence
  Description of Artificial Sequence: Synthetic oligonucleotide
aaaaguguuuuauaauuug

SEQ ID NO: 1384 - RNA, 19 nt, Artificial Sequence
  Description of Artificial Sequence: Synthetic oligonucleotide
aaaaaguguuuuauaauuu

SEQ ID NO: 1385 - RNA, 19 nt, Artificial Sequence
  Description of Artificial Sequence: Synthetic oligonucleotide
aaaaaaguguuuuauaauu

SEQ ID NO: 1386 - RNA, 19 nt, Artificial Sequence
  Description of Artificial Sequence: Synthetic oligonucleotide
uaaaaaaguguuuuauaau

SEQ ID NO: 1387 - RNA, 19 nt, Artificial Sequence
  Description of Artificial Sequence: Synthetic oligonucleotide
auaaaaaaguguuuuauaa

SEQ ID NO: 1388 - RNA, 19 nt, Artificial Sequence
  Description of Artificial Sequence: Synthetic oligonucleotide
uauaaaaaaguguuuuaua

SEQ ID NO: 1389 - RNA, 19 nt, Artificial Sequence
  Description of Artificial Sequence: Synthetic oligonucleotide
uuauaaaaaaguguuuuau

SEQ ID NO: 1390 - RNA, 19 nt, Artificial Sequence
  Description of Artificial Sequence: Synthetic oligonucleotide
auuauaaaaaaguguuuua

SEQ ID NO: 1391 - RNA, 19 nt, Artificial Sequence
  Description of Artificial Sequence: Synthetic oligonucleotide
uauuauaaaaaaguguuuu

SEQ ID NO: 1392 - RNA, 19 nt, Artificial Sequence
  Description of Artificial Sequence: Synthetic oligonucleotide
auauuauaaaaaaguguuu

SEQ ID NO: 1393 - RNA, 19 nt, Artificial Sequence
  Description of Artificial Sequence: Synthetic oligonucleotide
aauauuauaaaaaaguguu

SEQ ID NO: 1394 - RNA, 19 nt, Artificial Sequence
  Description of Artificial Sequence: Synthetic oligonucleotide
aaauauuauaaaaaagugu

SEQ ID NO: 1395 - RNA, 19 nt, Artificial Sequence
  Description of Artificial Sequence: Synthetic oligonucleotide
aaaauauuauaaaaaagug

SEQ ID NO: 1396 - RNA, 19 nt, Artificial Sequence
  Description of Artificial Sequence: Synthetic oligonucleotide
gaaaauauuauaaaaaagu

SEQ ID NO: 1397 - RNA, 19 nt, Artificial Sequence
  Description of Artificial Sequence: Synthetic oligonucleotide
agaaaauauuauaaaaaag

SEQ ID NO: 1398 - RNA, 19 nt, Artificial Sequence
  Description of Artificial Sequence: Synthetic oligonucleotide
gagaaaauauuauaaaaaa

SEQ ID NO: 1399 - RNA, 19 nt, Artificial Sequence
  Description of Artificial Sequence: Synthetic oligonucleotide
ugagaaaauauuauaaaaa

SEQ ID NO: 1400 - RNA, 19 nt, Artificial Sequence
  Description of Artificial Sequence: Synthetic oligonucleotide
gugagaaaauauuauaaaa

SEQ ID NO: 1401 - RNA, 19 nt, Artificial Sequence
  Description of Artificial Sequence: Synthetic oligonucleotide
agugagaaaauauuauaaa

SEQ ID NO: 1402 - RNA, 19 nt, Artificial Sequence
  Description of Artificial Sequence: Synthetic oligonucleotide
cagugagaaaauauuauaa

SEQ ID NO: 1403 - RNA, 19 nt, Artificial Sequence
  Description of Artificial Sequence: Synthetic oligonucleotide
ucagugagaaaauauuaua

SEQ ID NO: 1404 - RNA, 19 nt, Artificial Sequence
  Description of Artificial Sequence: Synthetic oligonucleotide
cucagugagaaaauauuau

SEQ ID NO: 1405 - RNA, 19 nt, Artificial Sequence
  Description of Artificial Sequence: Synthetic oligonucleotide
ucucagugagaaaauauua

SEQ ID NO: 1406 - RNA, 19 nt, Artificial Sequence
  Description of Artificial Sequence: Synthetic oligonucleotide
gucucagugagaaaauauu

SEQ ID NO: 1407 - RNA, 19 nt, Artificial Sequence
  Description of Artificial Sequence: Synthetic oligonucleotide
agucucagugagaaaauau

SEQ ID NO: 1408 - RNA, 19 nt, Artificial Sequence
  Description of Artificial Sequence: Synthetic oligonucleotide
gagucucagugagaaaaua

SEQ ID NO: 1409 - RNA, 19 nt, Artificial Sequence
  Description of Artificial Sequence: Synthetic oligonucleotide
ggagucucagugagaaaau

SEQ ID NO: 1410 - RNA, 19 nt, Artificial Sequence
  Description of Artificial Sequence: Synthetic oligonucleotide
gggagucucagugagaaaa

SEQ ID NO: 1411 - RNA, 19 nt, Artificial Sequence
  Description of Artificial Sequence: Synthetic oligonucleotide
ugggagucucagugagaaa

SEQ ID NO: 1412 - RNA, 19 nt, Artificial Sequence
  Description of Artificial Sequence: Synthetic oligonucleotide
cugggagucucagugagaa

SEQ ID NO: 1413 - RNA, 19 nt, Artificial Sequence
  Description of Artificial Sequence: Synthetic oligonucleotide
ccugggagucucagugaga

SEQ ID NO: 1414 - RNA, 19 nt, Artificial Sequence
  Description of Artificial Sequence: Synthetic oligonucleotide
cccugggagucucagugag

SEQ ID NO: 1415 - RNA, 19 nt, Artificial Sequence
  Description of Artificial Sequence: Synthetic oligonucleotide
gcccugggagucucaguga

SEQ ID NO: 1416 - RNA, 19 nt, Artificial Sequence
  Description of Artificial Sequence: Synthetic oligonucleotide
agcccugggagucucagug

SEQ ID NO: 1417 - RNA, 19 nt, Artificial Sequence
  Description of Artificial Sequence: Synthetic oligonucleotide
aagcccugggagucucagu

SEQ ID NO: 1418 - RNA, 19 nt, Artificial Sequence
  Description of Artificial Sequence: Synthetic oligonucleotide
aaagcccugggagucucag

SEQ ID NO: 1419 - RNA, 19 nt, Artificial Sequence
  Description of Artificial Sequence: Synthetic oligonucleotide
aaaagcccugggagucuca

SEQ ID NO: 1420 - RNA, 19 nt, Artificial Sequence
  Description of Artificial Sequence: Synthetic oligonucleotide
uaaaagcccugggagucuc

SEQ ID NO: 1421 - RNA, 19 nt, Artificial Sequence
  Description of Artificial Sequence: Synthetic oligonucleotide
guaaaagcccugggagucu

SEQ ID NO: 1422 - RNA, 19 nt, Artificial Sequence
  Description of Artificial Sequence: Synthetic oligonucleotide
aguaaaagcccugggaguc

SEQ ID NO: 1423 - RNA, 19 nt, Artificial Sequence
  Description of Artificial Sequence: Synthetic oligonucleotide
uaguaaaagcccugggagu

SEQ ID NO: 1424 - RNA, 19 nt, Artificial Sequence
  Description of Artificial Sequence: Synthetic oligonucleotide
auaguaaaagcccugggag

SEQ ID NO: 1425 - RNA, 19 nt, Artificial Sequence
  Description of Artificial Sequence: Synthetic oligonucleotide
gauaguaaaagcccuggga

SEQ ID NO: 1426 - RNA, 19 nt, Artificial Sequence
  Description of Artificial Sequence: Synthetic oligonucleotide
agauaguaaaagcccuggg

SEQ ID NO: 1427 - RNA, 19 nt, Artificial Sequence
  Description of Artificial Sequence: Synthetic oligonucleotide
gagauaguaaaagcccugg

SEQ ID NO: 1428 - RNA, 19 nt, Artificial Sequence
  Description of Artificial Sequence: Synthetic oligonucleotide
ggagauaguaaaagcccug

SEQ ID NO: 1429 - RNA, 19 nt, Artificial Sequence
  Description of Artificial Sequence: Synthetic oligonucleotide
uggagauaguaaaagcccu

SEQ ID NO: 1430 - RNA, 19 nt, Artificial Sequence
  Description of Artificial Sequence: Synthetic oligonucleotide
cuggagauaguaaaagccc

SEQ ID NO: 1431 - RNA, 19 nt, Artificial Sequence
  Description of Artificial Sequence: Synthetic oligonucleotide
ucuggagauaguaaaagcc

SEQ ID NO: 1432 - RNA, 19 nt, Artificial Sequence
  Description of Artificial Sequence: Synthetic oligonucleotide
uucuggagauaguaaaagc

SEQ ID NO: 1433 - RNA, 19 nt, Artificial Sequence
  Description of Artificial Sequence: Synthetic oligonucleotide
auucuggagauaguaaaag

SEQ ID NO: 1434 - RNA, 19 nt, Artificial Sequence
  Description of Artificial Sequence: Synthetic oligonucleotide
cauucuggagauaguaaaa

SEQ ID NO: 1435 - RNA, 19 nt, Artificial Sequence
  Description of Artificial Sequence: Synthetic oligonucleotide
acauucuggagauaguaaa

SEQ ID NO: 1436 - RNA, 19 nt, Artificial Sequence
  Description of Artificial Sequence: Synthetic oligonucleotide
uacauucuggagauaguaa

SEQ ID NO: 1437 - RNA, 19 nt, Artificial Sequence
  Description of Artificial Sequence: Synthetic oligonucleotide
auacauucuggagauagua

SEQ ID NO: 1438 - RNA, 19 nt, Artificial Sequence
  Description of Artificial Sequence: Synthetic oligonucleotide
aauacauucuggagauagu

SEQ ID NO: 1439 - RNA, 19 nt, Artificial Sequence
  Description of Artificial Sequence: Synthetic oligonucleotide
aaauacauucuggagauag

SEQ ID NO: 1440 - RNA, 19 nt, Artificial Sequence
  Description of Artificial Sequence: Synthetic oligonucleotide
aaaauacauucuggagaua

SEQ ID NO: 1441 - RNA, 19 nt, Artificial Sequence
  Description of Artificial Sequence: Synthetic oligonucleotide
aaaaauacauucuggagau

SEQ ID NO: 1442 - RNA, 19 nt, Artificial Sequence
  Description of Artificial Sequence: Synthetic oligonucleotide
gaaaaauacauucuggaga

SEQ ID NO: 1443 - RNA, 19 nt, Artificial Sequence
  Description of Artificial Sequence: Synthetic oligonucleotide
ggaaaaauacauucuggag

SEQ ID NO: 1444 - RNA, 19 nt, Artificial Sequence
  Description of Artificial Sequence: Synthetic oligonucleotide
aggaaaaauacauucugga

SEQ ID NO: 1445 - RNA, 19 nt, Artificial Sequence
  Description of Artificial Sequence: Synthetic oligonucleotide
aaggaaaaauacauucugg

SEQ ID NO: 1446 - RNA, 19 nt, Artificial Sequence
  Description of Artificial Sequence: Synthetic oligonucleotide
aaaggaaaaauacauucug

SEQ ID NO: 1447 - RNA, 19 nt, Artificial Sequence
  Description of Artificial Sequence: Synthetic oligonucleotide
aaaaggaaaaauacauucu

SEQ ID NO: 1448 - RNA, 19 nt, Artificial Sequence
  Description of Artificial Sequence: Synthetic oligonucleotide
aaaaaggaaaaauacauuc

SEQ ID NO: 1449 - RNA, 19 nt, Artificial Sequence
  Description of Artificial Sequence: Synthetic oligonucleotide
gaaaaaggaaaaauacauu

SEQ ID NO: 1450 - RNA, 19 nt, Artificial Sequence
  Description of Artificial Sequence: Synthetic oligonucleotide
ggaaaaaggaaaaauacau

SEQ ID NO: 1451 - RNA, 19 nt, Artificial Sequence
  Description of Artificial Sequence: Synthetic oligonucleotide
cggaaaaaggaaaaauaca

SEQ ID NO: 1452 - RNA, 19 nt, Artificial Sequence
  Description of Artificial Sequence: Synthetic oligonucleotide
acggaaaaaggaaaaauac

SEQ ID NO: 1453 - RNA, 19 nt, Artificial Sequence
  Description of Artificial Sequence: Synthetic oligonucleotide
uacggaaaaaggaaaaaua

SEQ ID NO: 1454 - RNA, 19 nt, Artificial Sequence
  Description of Artificial Sequence: Synthetic oligonucleotide
uuacggaaaaaggaaaaau

SEQ ID NO: 1455 - RNA, 19 nt, Artificial Sequence
  Description of Artificial Sequence: Synthetic oligonucleotide
cuuacggaaaaaggaaaaa

SEQ ID NO: 1456 - RNA, 19 nt, Artificial Sequence
  Description of Artificial Sequence: Synthetic oligonucleotide
ucuuacggaaaaaggaaaa

SEQ ID NO: 1457 - RNA, 19 nt, Artificial Sequence
  Description of Artificial Sequence: Synthetic oligonucleotide
gucuuacggaaaaaggaaa

SEQ ID NO: 1458 - RNA, 19 nt, Artificial Sequence
  Description of Artificial Sequence: Synthetic oligonucleotide
agucuuacggaaaaaggaa

SEQ ID NO: 1459 - RNA, 19 nt, Artificial Sequence
  Description of Artificial Sequence: Synthetic oligonucleotide
gagucuuacggaaaaagga

SEQ ID NO: 1460 - RNA, 19 nt, Artificial Sequence
  Description of Artificial Sequence: Synthetic oligonucleotide
ugagucuuacggaaaaagg

SEQ ID NO: 1461 - RNA, 19 nt, Artificial Sequence
  Description of Artificial Sequence: Synthetic oligonucleotide
uugagucuuacggaaaaag

SEQ ID NO: 1462 - RNA, 19 nt, Artificial Sequence
  Description of Artificial Sequence: Synthetic oligonucleotide
uuugagucuuacggaaaaa

SEQ ID NO: 1463 - RNA, 19 nt, Artificial Sequence
  Description of Artificial Sequence: Synthetic oligonucleotide
uuuugagucuuacggaaaa

SEQ ID NO: 1464 - RNA, 19 nt, Artificial Sequence
  Description of Artificial Sequence: Synthetic oligonucleotide
cuuuugagucuuacggaaa

SEQ ID NO: 1465 - RNA, 19 nt, Artificial Sequence
  Description of Artificial Sequence: Synthetic oligonucleotide
acuuuugagucuuacggaa

SEQ ID NO: 1466 - RNA, 19 nt, Artificial Sequence
  Description of Artificial Sequence: Synthetic oligonucleotide
uacuuuugagucuuacgga

SEQ ID NO: 1467 - RNA, 19 nt, Artificial Sequence
  Description of Artificial Sequence: Synthetic oligonucleotide
uuacuuuugagucuuacgg

SEQ ID NO: 1468 - RNA, 19 nt, Artificial Sequence
  Description of Artificial Sequence: Synthetic oligonucleotide
auuacuuuugagucuuacg

SEQ ID NO: 1469 - RNA, 19 nt, Artificial Sequence
  Description of Artificial Sequence: Synthetic oligonucleotide
uauuacuuuugagucuuac

SEQ ID NO: 1470 - RNA, 19 nt, Artificial Sequence
  Description of Artificial Sequence: Synthetic oligonucleotide
auauuacuuuugagucuua

SEQ ID NO: 1471 - RNA, 19 nt, Artificial Sequence
  Description of Artificial Sequence: Synthetic oligonucleotide
uauauuacuuuugagucuu

SEQ ID NO: 1472 - RNA, 19 nt, Artificial Sequence
  Description of Artificial Sequence: Synthetic oligonucleotide
uuauauuacuuuugagucu

SEQ ID NO: 1473 - RNA, 19 nt, Artificial Sequence
  Description of Artificial Sequence: Synthetic oligonucleotide
cuuauauuacuuuugaguc

SEQ ID NO: 1474 - RNA, 19 nt, Artificial Sequence
  Description of Artificial Sequence: Synthetic oligonucleotide
ccuuauauuacuuuugagu

SEQ ID NO: 1475 - RNA, 19 nt, Artificial Sequence
  Description of Artificial Sequence: Synthetic oligonucleotide
accuuauauuacuuuugag

SEQ ID NO: 1476 - RNA, 19 nt, Artificial Sequence
  Description of Artificial Sequence: Synthetic oligonucleotide
gaccuuauauuacuuuuga

SEQ ID NO: 1477 - RNA, 19 nt, Artificial Sequence
  Description of Artificial Sequence: Synthetic oligonucleotide
agaccuuauauuacuuuug

SEQ ID NO: 1478 - RNA, 19 nt, Artificial Sequence
  Description of Artificial Sequence: Synthetic oligonucleotide
uagaccuuauauuacuuuu

SEQ ID NO: 1479 - RNA, 19 nt, Artificial Sequence
  Description of Artificial Sequence: Synthetic oligonucleotide
guagaccuuauauuacuuu

SEQ ID NO: 1480 - RNA, 19 nt, Artificial Sequence
  Description of Artificial Sequence: Synthetic oligonucleotide
uguagaccuuauauuacuu

SEQ ID NO: 1481 - RNA, 19 nt, Artificial Sequence
  Description of Artificial Sequence: Synthetic oligonucleotide
uuguagaccuuauauuacu

SEQ ID NO: 1482 - RNA, 19 nt, Artificial Sequence
  Description of Artificial Sequence: Synthetic oligonucleotide
uuuguagaccuuauauuac

SEQ ID NO: 1483 - RNA, 19 nt, Artificial Sequence
  Description of Artificial Sequence: Synthetic oligonucleotide
uuuuguagaccuuauauua

SEQ ID NO: 1484 - RNA, 19 nt, Artificial Sequence
  Description of Artificial Sequence: Synthetic oligonucleotide
auuuuguagaccuuauauu

SEQ ID NO: 1485 - RNA, 19 nt, Artificial Sequence
  Description of Artificial Sequence: Synthetic oligonucleotide
gauuuuguagaccuuauau

SEQ ID NO: 1486 - RNA, 19 nt, Artificial Sequence
  Description of Artificial Sequence: Synthetic oligonucleotide
agauuuuguagaccuuaua

SEQ ID NO: 1487 - RNA, 19 nt, Artificial Sequence
  Description of Artificial Sequence: Synthetic oligonucleotide
uagauuuuguagaccuuau

SEQ ID NO: 1488 - RNA, 19 nt, Artificial Sequence
  Description of Artificial Sequence: Synthetic oligonucleotide
guagauuuuguagaccuua

SEQ ID NO: 1489 - RNA, 19 nt, Artificial Sequence
  Description of Artificial Sequence: Synthetic oligonucleotide
aguagauuuuguagaccuu

SEQ ID NO: 1490 - RNA, 19 nt, Artificial Sequence
  Description of Artificial Sequence: Synthetic oligonucleotide
uaguagauuuuguagaccu

SEQ ID NO: 1491 - RNA, 19 nt, Artificial Sequence
  Description of Artificial Sequence: Synthetic oligonucleotide
uuaguagauuuuguagacc

SEQ ID NO: 1492 - RNA, 19 nt, Artificial Sequence
  Description of Artificial Sequence: Synthetic oligonucleotide
uuuaguagauuuuguagac

SEQ ID NO: 1493 - RNA, 19 nt, Artificial Sequence
  Description of Artificial Sequence: Synthetic oligonucleotide
uuuuaguagauuuuguaga

SEQ ID NO: 1494 - RNA, 19 nt, Artificial Sequence
  Description of Artificial Sequence: Synthetic oligonucleotide
uuuuuaguagauuuuguag

SEQ ID NO: 1495 - RNA, 19 nt, Artificial Sequence
  Description of Artificial Sequence: Synthetic oligonucleotide
cuuuuuaguagauuuugua

SEQ ID NO: 1496 - RNA, 19 nt, Artificial Sequence
  Description of Artificial Sequence: Synthetic oligonucleotide
acuuuuuaguagauuuugu

SEQ ID NO: 1497 - RNA, 19 nt, Artificial Sequence
  Description of Artificial Sequence: Synthetic oligonucleotide
gacuuuuuaguagauuuug

SEQ ID NO: 1498 - RNA, 19 nt, Artificial Sequence
  Description of Artificial Sequence: Synthetic oligonucleotide
agacuuuuuaguagauuuu

SEQ ID NO: 1499 - RNA, 19 nt, Artificial Sequence
  Description of Artificial Sequence: Synthetic oligonucleotide
gagacuuuuuaguagauuu

SEQ ID NO: 1500 - RNA, 19 nt, Artificial Sequence
  Description of Artificial Sequence: Synthetic oligonucleotide
agagacuuuuuaguagauu

SEQ ID NO: 1501 - RNA, 19 nt, Artificial Sequence
  Description of Artificial Sequence: Synthetic oligonucleotide
cagagacuuuuuaguagau

SEQ ID NO: 1502 - RNA, 19 nt, Artificial Sequence
  Description of Artificial Sequence: Synthetic oligonucleotide
gcagagacuuuuuaguaga

SEQ ID NO: 1503 - RNA, 19 nt, Artificial Sequence
  Description of Artificial Sequence: Synthetic oligonucleotide
ugcagagacuuuuuaguag

SEQ ID NO: 1504 - RNA, 19 nt, Artificial Sequence
  Description of Artificial Sequence: Synthetic oligonucleotide
uugcagagacuuuuuagua

SEQ ID NO: 1505 - RNA, 19 nt, Artificial Sequence
  Description of Artificial Sequence: Synthetic oligonucleotide
uuugcagagacuuuuuagu

SEQ ID NO: 1506 - RNA, 19 nt, Artificial Sequence
  Description of Artificial Sequence: Synthetic oligonucleotide
uuuugcagagacuuuuuag

SEQ ID NO: 1507 - RNA, 19 nt, Artificial Sequence
  Description of Artificial Sequence: Synthetic oligonucleotide
uuuuugcagagacuuuuua

SEQ ID NO: 1508 - RNA, 19 nt, Artificial Sequence
  Description of Artificial Sequence: Synthetic oligonucleotide
cuuuuugcagagacuuuuu

SEQ ID NO: 1509 - RNA, 19 nt, Artificial Sequence
  Description of Artificial Sequence: Synthetic oligonucleotide
acuuuuugcagagacuuuu

SEQ ID NO: 1510 - RNA, 19 nt, Artificial Sequence
  Description of Artificial Sequence: Synthetic oligonucleotide
uacuuuuugcagagacuuu

SEQ ID NO: 1511 - RNA, 19 nt, Artificial Sequence
  Description of Artificial Sequence: Synthetic oligonucleotide
cuacuuuuugcagagacuu

SEQ ID NO: 1512 - RNA, 19 nt, Artificial Sequence
  Description of Artificial Sequence: Synthetic oligonucleotide
ucuacuuuuugcagagacu

SEQ ID NO: 1513 - RNA, 19 nt, Artificial Sequence
  Description of Artificial Sequence: Synthetic oligonucleotide
aucuacuuuuugcagagac

SEQ ID NO: 1514 - RNA, 19 nt, Artificial Sequence
  Description of Artificial Sequence: Synthetic oligonucleotide
caucuacuuuuugcagaga

SEQ ID NO: 1515 - RNA, 19 nt, Artificial Sequence
  Description of Artificial Sequence: Synthetic oligonucleotide
ucaucuacuuuuugcagag

SEQ ID NO: 1516 - RNA, 19 nt, Artificial Sequence
  Description of Artificial Sequence: Synthetic oligonucleotide
uucaucuacuuuuugcaga

SEQ ID NO: 1517 - RNA, 19 nt, Artificial Sequence
  Description of Artificial Sequence: Synthetic oligonucleotide
cuucaucuacuuuuugcag

SEQ ID NO: 1518 - RNA, 19 nt, Artificial Sequence
  Description of Artificial Sequence: Synthetic oligonucleotide
ucuucaucuacuuuuugca

SEQ ID NO: 1519 - RNA, 19 nt, Artificial Sequence
  Description of Artificial Sequence: Synthetic oligonucleotide
cucuucaucuacuuuuugc

SEQ ID NO: 1520 - RNA, 19 nt, Artificial Sequence
  Description of Artificial Sequence: Synthetic oligonucleotide
ccucuucaucuacuuuuug

SEQ ID NO: 1521 - RNA, 19 nt, Artificial Sequence
  Description of Artificial Sequence: Synthetic oligonucleotide
uccucuucaucuacuuuuu

SEQ ID NO: 1522 - RNA, 19 nt, Artificial Sequence
  Description of Artificial Sequence: Synthetic oligonucleotide
guccucuucaucuacuuuu

SEQ ID NO: 1523 - RNA, 19 nt, Artificial Sequence
  Description of Artificial Sequence: Synthetic oligonucleotide
aguccucuucaucuacuuu

SEQ ID NO: 1524 - RNA, 19 nt, Artificial Sequence
  Description of Artificial Sequence: Synthetic oligonucleotide
gaguccucuucaucuacuu

SEQ ID NO: 1525 - RNA, 19 nt, Artificial Sequence
  Description of Artificial Sequence: Synthetic oligonucleotide
agaguccucuucaucuacu

SEQ ID NO: 1526 - RNA, 19 nt, Artificial Sequence
  Description of Artificial Sequence: Synthetic oligonucleotide
cagaguccucuucaucuac

SEQ ID NO: 1527 - RNA, 19 nt, Artificial Sequence
  Description of Artificial Sequence: Synthetic oligonucleotide
ucagaguccucuucaucua

SEQ ID NO: 1528 - RNA, 19 nt, Artificial Sequence
  Description of Artificial Sequence: Synthetic oligonucleotide
aucagaguccucuucaucu

SEQ ID NO: 1529 - RNA, 19 nt, Artificial Sequence
  Description of Artificial Sequence: Synthetic oligonucleotide
caucagaguccucuucauc

SEQ ID NO: 1530 - RNA, 19 nt, Artificial Sequence
  Description of Artificial Sequence: Synthetic oligonucleotide
ucaucagaguccucuucau

SEQ ID NO: 1531 - RNA, 19 nt, Artificial Sequence
  Description of Artificial Sequence: Synthetic oligonucleotide
uucaucagaguccucuuca

SEQ ID NO: 1532 - RNA, 19 nt, Artificial Sequence
  Description of Artificial Sequence: Synthetic oligonucleotide
cuucaucagaguccucuuc

SEQ ID NO: 1533 - RNA, 19 nt, Artificial Sequence
  Description of Artificial Sequence: Synthetic oligonucleotide
ucuucaucagaguccucuu

SEQ ID NO: 1534 - RNA, 19 nt, Artificial Sequence
  Description of Artificial Sequence: Synthetic oligonucleotide
uucuucaucagaguccucu

SEQ ID NO: 1535 - RNA, 19 nt, Artificial Sequence
  Description of Artificial Sequence: Synthetic oligonucleotide
uuucuucaucagaguccuc

SEQ ID NO: 1536 - RNA, 19 nt, Artificial Sequence
  Description of Artificial Sequence: Synthetic oligonucleotide
cuuucuucaucagaguccu

SEQ ID NO: 1537 - RNA, 19 nt, Artificial Sequence
  Description of Artificial Sequence: Synthetic oligonucleotide
gcuuucuucaucagagucc

SEQ ID NO: 1538 - RNA, 19 nt, Artificial Sequence
  Description of Artificial Sequence: Synthetic oligonucleotide
ggcuuucuucaucagaguc

SEQ ID NO: 1539 - RNA, 19 nt, Artificial Sequence
  Description of Artificial Sequence: Synthetic oligonucleotide
uggcuuucuucaucagagu

SEQ ID NO: 1540 - RNA, 19 nt, Artificial Sequence
  Description of Artificial Sequence: Synthetic oligonucleotide
auggcuuucuucaucagag

SEQ ID NO: 1541 - RNA, 19 nt, Artificial Sequence
  Description of Artificial Sequence: Synthetic oligonucleotide
gauggcuuucuucaucaga

SEQ ID NO: 1542 - RNA, 19 nt, Artificial Sequence
  Description of Artificial Sequence: Synthetic oligonucleotide
ugauggcuuucuucaucag

SEQ ID NO: 1543 - RNA, 19 nt, Artificial Sequence
  Description of Artificial Sequence: Synthetic oligonucleotide
augauggcuuucuucauca

SEQ ID NO: 1544 - RNA, 19 nt, Artificial Sequence
  Description of Artificial Sequence: Synthetic oligonucleotide
caugauggcuuucuucauc

SEQ ID NO: 1545 - RNA, 19 nt, Artificial Sequence
  Description of Artificial Sequence: Synthetic oligonucleotide
ucaugauggcuuucuucau

SEQ ID NO: 1546 - RNA, 19 nt, Artificial Sequence
  Description of Artificial Sequence: Synthetic oligonucleotide
aucaugauggcuuucuuca

SEQ ID NO: 1547 - RNA, 19 nt, Artificial Sequence
  Description of Artificial Sequence: Synthetic oligonucleotide
caucaugauggcuuucuuc

SEQ ID NO: 1548 - RNA, 19 nt, Artificial Sequence
  Description of Artificial Sequence: Synthetic oligonucleotide
ucaucaugauggcuuucuu

SEQ ID NO: 1549 - RNA, 19 nt, Artificial Sequence
  Description of Artificial Sequence: Synthetic oligonucleotide
cucaucaugauggcuuucu

SEQ ID NO: 1550 - RNA, 19 nt, Artificial Sequence
  Description of Artificial Sequence: Synthetic oligonucleotide
ucucaucaugauggcuuuc

SEQ ID NO: 1551 - RNA, 19 nt, Artificial Sequence
  Description of Artificial Sequence: Synthetic oligonucleotide
aucucaucaugauggcuuu

SEQ ID NO: 1552 - RNA, 19 nt, Artificial Sequence
  Description of Artificial Sequence: Synthetic oligonucleotide
caucucaucaugauggcuu

SEQ ID NO: 1553 - RNA, 19 nt, Artificial Sequence
  Description of Artificial Sequence: Synthetic oligonucleotide
ucaucucaucaugauggcu

SEQ ID NO: 1554 - RNA, 19 nt, Artificial Sequence
  Description of Artificial Sequence: Synthetic oligonucleotide
cucaucucaucaugauggc

SEQ ID NO: 1555 - RNA, 19 nt, Artificial Sequence
  Description of Artificial Sequence: Synthetic oligonucleotide
acucaucucaucaugaugg

SEQ ID NO: 1556 - RNA, 19 nt, Artificial Sequence
  Description of Artificial Sequence: Synthetic oligonucleotide
cacucaucucaucaugaug

SEQ ID NO: 1557 - RNA, 19 nt, Artificial Sequence
  Description of Artificial Sequence: Synthetic oligonucleotide
ucacucaucucaucaugau

SEQ ID NO: 1558 - RNA, 19 nt, Artificial Sequence
  Description of Artificial Sequence: Synthetic oligonucleotide
cucacucaucucaucauga

SEQ ID NO: 1559 - RNA, 19 nt, Artificial Sequence
  Description of Artificial Sequence: Synthetic oligonucleotide
gcucacucaucucaucaug

SEQ ID NO: 1560 - RNA, 19 nt, Artificial Sequence
  Description of Artificial Sequence: Synthetic oligonucleotide
ugcucacucaucucaucau

SEQ ID NO: 1561 - RNA, 19 nt, Artificial Sequence
  Description of Artificial Sequence: Synthetic oligonucleotide
cugcucacucaucucauca

SEQ ID NO: 1562 - RNA, 19 nt, Artificial Sequence
  Description of Artificial Sequence: Synthetic oligonucleotide
ccugcucacucaucucauc

SEQ ID NO: 1563 - RNA, 19 nt, Artificial Sequence
  Description of Artificial Sequence: Synthetic oligonucleotide
uccugcucacucaucucau

SEQ ID NO: 1564 - RNA, 19 nt, Artificial Sequence
  Description of Artificial Sequence: Synthetic oligonucleotide
uuccugcucacucaucuca

SEQ ID NO: 1565 - RNA, 19 nt, Artificial Sequence
  Description of Artificial Sequence: Synthetic oligonucleotide
cuuccugcucacucaucuc

SEQ ID NO: 1566 - RNA, 19 nt, Artificial Sequence
  Description of Artificial Sequence: Synthetic oligonucleotide
ucuuccugcucacucaucu

SEQ ID NO: 1567 - RNA, 19 nt, Artificial Sequence
  Description of Artificial Sequence: Synthetic oligonucleotide
cucuuccugcucacucauc

SEQ ID NO: 1568 - RNA, 19 nt, Artificial Sequence
  Description of Artificial Sequence: Synthetic oligonucleotide
ccucuuccugcucacucau

SEQ ID NO: 1569 - RNA, 19 nt, Artificial Sequence
  Description of Artificial Sequence: Synthetic oligonucleotide
uccucuuccugcucacuca

SEQ ID NO: 1570 - RNA, 19 nt, Artificial Sequence
  Description of Artificial Sequence: Synthetic oligonucleotide
cuccucuuccugcucacuc

SEQ ID NO: 1571 - RNA, 19 nt, Artificial Sequence
  Description of Artificial Sequence: Synthetic oligonucleotide
gcuccucuuccugcucacu

SEQ ID NO: 1572 - RNA, 19 nt, Artificial Sequence
  Description of Artificial Sequence: Synthetic oligonucleotide
agcuccucuuccugcucac

SEQ ID NO: 1573 - RNA, 19 nt, Artificial Sequence
  Description of Artificial Sequence: Synthetic oligonucleotide
aagcuccucuuccugcuca

SEQ ID NO: 1574 - RNA, 19 nt, Artificial Sequence
  Description of Artificial Sequence: Synthetic oligonucleotide
caagcuccucuuccugcuc

SEQ ID NO: 1575 - RNA, 19 nt, Artificial Sequence
  Description of Artificial Sequence: Synthetic oligonucleotide
ucaagcuccucuuccugcu

SEQ ID NO: 1576 - RNA, 19 nt, Artificial Sequence
  Description of Artificial Sequence: Synthetic oligonucleotide
cucaagcuccucuuccugc

SEQ ID NO: 1577 - RNA, 19 nt, Artificial Sequence
  Description of Artificial Sequence: Synthetic oligonucleotide
ccucaagcuccucuuccug

SEQ ID NO: 1578 - RNA, 19 nt, Artificial Sequence
  Description of Artificial Sequence: Synthetic oligonucleotide
uccucaagcuccucuuccu

SEQ ID NO: 1579 - RNA, 19 nt, Artificial Sequence
  Description of Artificial Sequence: Synthetic oligonucleotide
auccucaagcuccucuucc

SEQ ID NO: 1580 - RNA, 19 nt, Artificial Sequence
  Description of Artificial Sequence: Synthetic oligonucleotide
cauccucaagcuccucuuc

SEQ ID NO: 1581 - RNA, 19 nt, Artificial Sequence
  Description of Artificial Sequence: Synthetic oligonucleotide
ucauccucaagcuccucuu

SEQ ID NO: 1582 - RNA, 19 nt, Artificial Sequence
  Description of Artificial Sequence: Synthetic oligonucleotide
aucauccucaagcuccucu

SEQ ID NO: 1583 - RNA, 19 nt, Artificial Sequence
  Description of Artificial Sequence: Synthetic oligonucleotide
gaucauccucaagcuccuc

SEQ ID NO: 1584 - RNA, 19 nt, Artificial Sequence
  Description of Artificial Sequence: Synthetic oligonucleotide
ggaucauccucaagcuccu

SEQ ID NO: 1585 - RNA, 19 nt, Artificial Sequence
  Description of Artificial Sequence: Synthetic oligonucleotide
aggaucauccucaagcucc

SEQ ID NO: 1586 - RNA, 19 nt, Artificial Sequence
  Description of Artificial Sequence: Synthetic oligonucleotide
uaggaucauccucaagcuc

SEQ ID NO: 1587 - RNA, 19 nt, Artificial Sequence
  Description of Artificial Sequence: Synthetic oligonucleotide
guaggaucauccucaagcu

SEQ ID NO: 1588 - RNA, 19 nt, Artificial Sequence
  Description of Artificial Sequence: Synthetic oligonucleotide
aguaggaucauccucaagc

SEQ ID NO: 1589 - RNA, 19 nt, Artificial Sequence
  Description of Artificial Sequence: Synthetic oligonucleotide
caguaggaucauccucaag

SEQ ID NO: 1590 - RNA, 19 nt, Artificial Sequence
  Description of Artificial Sequence: Synthetic oligonucleotide
acaguaggaucauccucaa

SEQ ID NO: 1591 - RNA, 19 nt, Artificial Sequence
  Description of Artificial Sequence: Synthetic oligonucleotide
uacaguaggaucauccuca

SEQ ID NO: 1592 - RNA, 19 nt, Artificial Sequence
  Description of Artificial Sequence: Synthetic oligonucleotide
cuacaguaggaucauccuc

SEQ ID NO: 1593 - RNA, 19 nt, Artificial Sequence
  Description of Artificial Sequence: Synthetic oligonucleotide
acuacaguaggaucauccu

SEQ ID NO: 1594 - RNA, 19 nt, Artificial Sequence
  Description of Artificial Sequence: Synthetic oligonucleotide
gacuacaguaggaucaucc

SEQ ID NO: 1595 - RNA, 19 nt, Artificial Sequence
  Description of Artificial Sequence: Synthetic oligonucleotide
ugacuacaguaggaucauc

SEQ ID NO: 1596 - RNA, 19 nt, Artificial Sequence
  Description of Artificial Sequence: Synthetic oligonucleotide
uugacuacaguaggaucau

SEQ ID NO: 1597 - RNA, 19 nt, Artificial Sequence
  Description of Artificial Sequence: Synthetic oligonucleotide
uuugacuacaguaggauca

SEQ ID NO: 1598 - RNA, 19 nt, Artificial Sequence
  Description of Artificial Sequence: Synthetic oligonucleotide
uuuugacuacaguaggauc

SEQ ID NO: 1599 - RNA, 19 nt, Artificial Sequence
  Description of Artificial Sequence: Synthetic oligonucleotide
uuuuugacuacaguaggau

SEQ ID NO: 1600 - RNA, 19 nt, Artificial Sequence
  Description of Artificial Sequence: Synthetic oligonucleotide
guuuuugacuacaguagga

SEQ ID NO: 1601 - RNA, 19 nt, Artificial Sequence
  Description of Artificial Sequence: Synthetic oligonucleotide
aguuuuugacuacaguagg

SEQ ID NO: 1602 - RNA, 19 nt, Artificial Sequence
  Description of Artificial Sequence: Synthetic oligonucleotide
uaguuuuugacuacaguag

SEQ ID NO: 1603 - RNA, 19 nt, Artificial Sequence
  Description of Artificial Sequence: Synthetic oligonucleotide
auaguuuuugacuacagua

SEQ ID NO: 1604 - RNA, 19 nt, Artificial Sequence
  Description of Artificial Sequence: Synthetic oligonucleotide
uauaguuuuugacuacagu

SEQ ID NO: 1605 - RNA, 19 nt, Artificial Sequence
  Description of Artificial Sequence: Synthetic oligonucleotide
uuauaguuuuugacuacag

SEQ ID NO: 1606 - RNA, 19 nt, Artificial Sequence
  Description of Artificial Sequence: Synthetic oligonucleotide
uuuauaguuuuugacuaca

SEQ ID NO: 1607 - RNA, 19 nt, Artificial Sequence
  Description of Artificial Sequence: Synthetic oligonucleotide
cuuuauaguuuuugacuac

SEQ ID NO: 1608 - RNA, 19 nt, Artificial Sequence
  Description of Artificial Sequence: Synthetic oligonucleotide
ucuuuauaguuuuugacua

SEQ ID NO: 1609 - RNA, 19 nt, Artificial Sequence
  Description of Artificial Sequence: Synthetic oligonucleotide
gucuuuauaguuuuugacu

SEQ ID NO: 1610 - RNA, 19 nt, Artificial Sequence
  Description of Artificial Sequence: Synthetic oligonucleotide
ggucuuuauaguuuuugac

SEQ ID NO: 1611 - RNA, 19 nt, Artificial Sequence
  Description of Artificial Sequence: Synthetic oligonucleotide
aggucuuuauaguuuuuga

SEQ ID NO: 1612 - RNA, 19 nt, Artificial Sequence
  Description of Artificial Sequence: Synthetic oligonucleotide
caggucuuuauaguuuuug

SEQ ID NO: 1613 - RNA, 19 nt, Artificial Sequence
  Description of Artificial Sequence: Synthetic oligonucleotide
ccaggucuuuauaguuuuu

SEQ ID NO: 1614 - RNA, 19 nt, Artificial Sequence
  Description of Artificial Sequence: Synthetic oligonucleotide
uccaggucuuuauaguuuu

SEQ ID NO: 1615 - RNA, 19 nt, Artificial Sequence
  Description of Artificial Sequence: Synthetic oligonucleotide
uuccaggucuuuauaguuu

SEQ ID NO: 1616 - RNA, 19 nt, Artificial Sequence
  Description of Artificial Sequence: Synthetic oligonucleotide
uuuccaggucuuuauaguu

SEQ ID NO: 1617 - RNA, 19 nt, Artificial Sequence
  Description of Artificial Sequence: Synthetic oligonucleotide
uuuuccaggucuuuauagu

SEQ ID NO: 1618 - RNA, 19 nt, Artificial Sequence
  Description of Artificial Sequence: Synthetic oligonucleotide
uuuuuccaggucuuuauag

SEQ ID NO: 1619 - RNA, 19 nt, Artificial Sequence
  Description of Artificial Sequence: Synthetic oligonucleotide
cuuuuuccaggucuuuaua

SEQ ID NO: 1620 - RNA, 19 nt, Artificial Sequence
  Description of Artificial Sequence: Synthetic oligonucleotide
gcuuuuuccaggucuuuau

SEQ ID NO: 1621 - RNA, 19 nt, Artificial Sequence
  Description of Artificial Sequence: Synthetic oligonucleotide
ugcuuuuuccaggucuuua

SEQ ID NO: 1622 - RNA, 19 nt, Artificial Sequence
  Description of Artificial Sequence: Synthetic oligonucleotide
cugcuuuuuccaggucuuu

SEQ ID NO: 1623 - RNA, 19 nt, Artificial Sequence
  Description of Artificial Sequence: Synthetic oligonucleotide
acugcuuuuuccaggucuu

SEQ ID NO: 1624 - RNA, 19 nt, Artificial Sequence
  Description of Artificial Sequence: Synthetic oligonucleotide
aacugcuuuuuccaggucu

SEQ ID NO: 1625 - RNA, 19 nt, Artificial Sequence
  Description of Artificial Sequence: Synthetic oligonucleotide
gaacugcuuuuuccagguc

SEQ ID NO: 1626 - RNA, 19 nt, Artificial Sequence
  Description of Artificial Sequence: Synthetic oligonucleotide
ugaacugcuuuuuccaggu

SEQ ID NO: 1627 - RNA, 19 nt, Artificial Sequence
  Description of Artificial Sequence: Synthetic oligonucleotide
cugaacugcuuuuuccagg

SEQ ID NO: 1628 - RNA, 19 nt, Artificial Sequence
  Description of Artificial Sequence: Synthetic oligonucleotide
acugaacugcuuuuuccag

SEQ ID NO: 1629 - RNA, 19 nt, Artificial Sequence
  Description of Artificial Sequence: Synthetic oligonucleotide
gacugaacugcuuuuucca

SEQ ID NO: 1630 - RNA, 19 nt, Artificial Sequence
  Description of Artificial Sequence: Synthetic oligonucleotide
agacugaacugcuuuuucc

SEQ ID NO: 1631 - RNA, 19 nt, Artificial Sequence
  Description of Artificial Sequence: Synthetic oligonucleotide
aagacugaacugcuuuuuc

SEQ ID NO: 1632 - RNA, 19 nt, Artificial Sequence
  Description of Artificial Sequence: Synthetic oligonucleotide
aaagacugaacugcuuuuu

SEQ ID NO: 1633 - RNA, 19 nt, Artificial Sequence
  Description of Artificial Sequence: Synthetic oligonucleotide
aaaagacugaacugcuuuu

SEQ ID NO: 1634 - RNA, 19 nt, Artificial Sequence
  Description of Artificial Sequence: Synthetic oligonucleotide
gaaaagacugaacugcuuu

SEQ ID NO: 1635 - RNA, 19 nt, Artificial Sequence
  Description of Artificial Sequence: Synthetic oligonucleotide
cgaaaagacugaacugcuu

SEQ ID NO: 1636 - RNA, 19 nt, Artificial Sequence
  Description of Artificial Sequence: Synthetic oligonucleotide
ccgaaaagacugaacugcu

SEQ ID NO: 1637 - RNA, 19 nt, Artificial Sequence
  Description of Artificial Sequence: Synthetic oligonucleotide
accgaaaagacugaacugc

SEQ ID NO: 1638 - RNA, 19 nt, Artificial Sequence
  Description of Artificial Sequence: Synthetic oligonucleotide
uaccgaaaagacugaacug

SEQ ID NO: 1639 - RNA, 19 nt, Artificial Sequence
  Description of Artificial Sequence: Synthetic oligonucleotide
auaccgaaaagacugaacu

SEQ ID NO: 1640 - RNA, 19 nt, Artificial Sequence
  Description of Artificial Sequence: Synthetic oligonucleotide
cauaccgaaaagacugaac

SEQ ID NO: 1641 - RNA, 19 nt, Artificial Sequence
  Description of Artificial Sequence: Synthetic oligonucleotide
ucauaccgaaaagacugaa

SEQ ID NO: 1642 - RNA, 19 nt, Artificial Sequence
  Description of Artificial Sequence: Synthetic oligonucleotide
aucauaccgaaaagacuga

SEQ ID NO: 1643 - RNA, 19 nt, Artificial Sequence
  Description of Artificial Sequence: Synthetic oligonucleotide
caucauaccgaaaagacug

SEQ ID NO: 1644 - RNA, 19 nt, Artificial Sequence
  Description of Artificial Sequence: Synthetic oligonucleotide
acaucauaccgaaaagacu

SEQ ID NO: 1645 - RNA, 19 nt, Artificial Sequence
  Description of Artificial Sequence: Synthetic oligonucleotide
aacaucauaccgaaaagac

SEQ ID NO: 1646 - RNA, 19 nt, Artificial Sequence
  Description of Artificial Sequence: Synthetic oligonucleotide
caacaucauaccgaaaaga

SEQ ID NO: 1647 - RNA, 19 nt, Artificial Sequence
  Description of Artificial Sequence: Synthetic oligonucleotide
acaacaucauaccgaaaag

SEQ ID NO: 1648 - RNA, 19 nt, Artificial Sequence
  Description of Artificial Sequence: Synthetic oligonucleotide
gacaacaucauaccgaaaa

SEQ ID NO: 1649 - RNA, 19 nt, Artificial Sequence
  Description of Artificial Sequence: Synthetic oligonucleotide
ggacaacaucauaccgaaa

SEQ ID NO: 1650 - RNA, 19 nt, Artificial Sequence
  Description of Artificial Sequence: Synthetic oligonucleotide
aggacaacaucauaccgaa

SEQ ID NO: 1651 - RNA, 19 nt, Artificial Sequence
  Description of Artificial Sequence: Synthetic oligonucleotide
caggacaacaucauaccga

SEQ ID NO: 1652 - RNA, 19 nt, Artificial Sequence
  Description of Artificial Sequence: Synthetic oligonucleotide
ucaggacaacaucauaccg

SEQ ID NO: 1653 - RNA, 19 nt, Artificial Sequence
  Description of Artificial Sequence: Synthetic oligonucleotide
uucaggacaacaucauacc

SEQ ID NO: 1654 - RNA, 19 nt, Artificial Sequence
  Description of Artificial Sequence: Synthetic oligonucleotide
cuucaggacaacaucauac

SEQ ID NO: 1655 - RNA, 19 nt, Artificial Sequence
  Description of Artificial Sequence: Synthetic oligonucleotide
ucuucaggacaacaucaua

SEQ ID NO: 1656 - RNA, 19 nt, Artificial Sequence
  Description of Artificial Sequence: Synthetic oligonucleotide
gucuucaggacaacaucau

SEQ ID NO: 1657 - RNA, 19 nt, Artificial Sequence
  Description of Artificial Sequence: Synthetic oligonucleotide
cgucuucaggacaacauca

SEQ ID NO: 1658 - RNA, 19 nt, Artificial Sequence
  Description of Artificial Sequence: Synthetic oligonucleotide
ccgucuucaggacaacauc

SEQ ID NO: 1659 - RNA, 19 nt, Artificial Sequence
  Description of Artificial Sequence: Synthetic oligonucleotide
cccgucuucaggacaacau

SEQ ID NO: 1660 - RNA, 19 nt, Artificial Sequence
  Description of Artificial Sequence: Synthetic oligonucleotide
ccccgucuucaggacaaca

SEQ ID NO: 1661 - RNA, 19 nt, Artificial Sequence
  Description of Artificial Sequence: Synthetic oligonucleotide
gccccgucuucaggacaac

SEQ ID NO: 1662 - RNA, 19 nt, Artificial Sequence
  Description of Artificial Sequence: Synthetic oligonucleotide
agccccgucuucaggacaa

SEQ ID NO: 1663 - RNA, 19 nt, Artificial Sequence
  Description of Artificial Sequence: Synthetic oligonucleotide
uagccccgucuucaggaca

SEQ ID NO: 1664 - RNA, 19 nt, Artificial Sequence
  Description of Artificial Sequence: Synthetic oligonucleotide
cuagccccgucuucaggac

SEQ ID NO: 1665 - RNA, 19 nt, Artificial Sequence
  Description of Artificial Sequence: Synthetic oligonucleotide
ucuagccccgucuucagga

SEQ ID NO: 1666 - RNA, 19 nt, Artificial Sequence
  Description of Artificial Sequence: Synthetic oligonucleotide
aucuagccccgucuucagg

SEQ ID NO: 1667 - RNA, 19 nt, Artificial Sequence
  Description of Artificial Sequence: Synthetic oligonucleotide
uaucuagccccgucuucag

SEQ ID NO: 1668 - RNA, 19 nt, Artificial Sequence
  Description of Artificial Sequence: Synthetic oligonucleotide
auaucuagccccgucuuca

SEQ ID NO: 1669 - RNA, 19 nt, Artificial Sequence
  Description of Artificial Sequence: Synthetic oligonucleotide
aauaucuagccccgucuuc

SEQ ID NO: 1670 - RNA, 19 nt, Artificial Sequence
  Description of Artificial Sequence: Synthetic oligonucleotide
caauaucuagccccgucuu

SEQ ID NO: 1671 - RNA, 19 nt, Artificial Sequence
  Description of Artificial Sequence: Synthetic oligonucleotide
ccaauaucuagccccgucu

SEQ ID NO: 1672 - RNA, 19 nt, Artificial Sequence
  Description of Artificial Sequence: Synthetic oligonucleotide
cccaauaucuagccccguc

SEQ ID NO: 1673 - RNA, 19 nt, Artificial Sequence
  Description of Artificial Sequence: Synthetic oligonucleotide
ucccaauaucuagccccgu

SEQ ID NO: 1674 - RNA, 19 nt, Artificial Sequence
  Description of Artificial Sequence: Synthetic oligonucleotide
cucccaauaucuagccccg

SEQ ID NO: 1675 - RNA, 19 nt, Artificial Sequence
  Description of Artificial Sequence: Synthetic oligonucleotide
ucucccaauaucuagcccc

SEQ ID NO: 1676 - RNA, 19 nt, Artificial Sequence
  Description of Artificial Sequence: Synthetic oligonucleotide
uucucccaauaucuagccc

SEQ ID NO: 1677 - RNA, 19 nt, Artificial Sequence
  Description of Artificial Sequence: Synthetic oligonucleotide
uuucucccaauaucuagcc

SEQ ID NO: 1678 - RNA, 19 nt, Artificial Sequence
  Description of Artificial Sequence: Synthetic oligonucleotide
guuucucccaauaucuagc

SEQ ID NO: 1679 - RNA, 19 nt, Artificial Sequence
  Description of Artificial Sequence: Synthetic oligonucleotide
uguuucucccaauaucuag

SEQ ID NO: 1680 - RNA, 19 nt, Artificial Sequence
  Description of Artificial Sequence: Synthetic oligonucleotide
uuguuucucccaauaucua

SEQ ID NO: 1681 - RNA, 19 nt, Artificial Sequence
  Description of Artificial Sequence: Synthetic oligonucleotide
uuuguuucucccaauaucu

SEQ ID NO: 1682 - RNA, 19 nt, Artificial Sequence
  Description of Artificial Sequence: Synthetic oligonucleotide
cuuuguuucucccaauauc

SEQ ID NO: 1683 - RNA, 19 nt, Artificial Sequence
  Description of Artificial Sequence: Synthetic oligonucleotide
acuuuguuucucccaauau

SEQ ID NO: 1684 - RNA, 19 nt, Artificial Sequence
  Description of Artificial Sequence: Synthetic oligonucleotide
cacuuuguuucucccaaua

SEQ ID NO: 1685 - RNA, 19 nt, Artificial Sequence
  Description of Artificial Sequence: Synthetic oligonucleotide
ccacuuuguuucucccaau

SEQ ID NO: 1686 - RNA, 19 nt, Artificial Sequence
  Description of Artificial Sequence: Synthetic oligonucleotide
uccacuuuguuucucccaa

SEQ ID NO: 1687 - RNA, 19 nt, Artificial Sequence
  Description of Artificial Sequence: Synthetic oligonucleotide
uuccacuuuguuucuccca

SEQ ID NO: 1688 - RNA, 19 nt, Artificial Sequence
  Description of Artificial Sequence: Synthetic oligonucleotide
cuuccacuuuguuucuccc

SEQ ID NO: 1689 - RNA, 19 nt, Artificial Sequence
  Description of Artificial Sequence: Synthetic oligonucleotide
ucuuccacuuuguuucucc

SEQ ID NO: 1690 - RNA, 19 nt, Artificial Sequence
  Description of Artificial Sequence: Synthetic oligonucleotide
aucuuccacuuuguuucuc

SEQ ID NO: 1691 - RNA, 19 nt, Artificial Sequence
  Description of Artificial Sequence: Synthetic oligonucleotide
caucuuccacuuuguuucu

SEQ ID NO: 1692 - RNA, 19 nt, Artificial Sequence
  Description of Artificial Sequence: Synthetic oligonucleotide
gcaucuuccacuuuguuuc

SEQ ID NO: 1693 - RNA, 19 nt, Artificial Sequence
  Description of Artificial Sequence: Synthetic oligonucleotide
agcaucuuccacuuuguuu

SEQ ID NO: 1694 - RNA, 19 nt, Artificial Sequence
  Description of Artificial Sequence: Synthetic oligonucleotide
aagcaucuuccacuuuguu

SEQ ID NO: 1695 - RNA, 19 nt, Artificial Sequence
  Description of Artificial Sequence: Synthetic oligonucleotide
aaagcaucuuccacuuugu

SEQ ID NO: 1696 - RNA, 19 nt, Artificial Sequence
  Description of Artificial Sequence: Synthetic oligonucleotide
gaaagcaucuuccacuuug

SEQ ID NO: 1697 - RNA, 19 nt, Artificial Sequence
  Description of Artificial Sequence: Synthetic oligonucleotide
agaaagcaucuuccacuuu

SEQ ID NO: 1698 - RNA, 19 nt, Artificial Sequence
  Description of Artificial Sequence: Synthetic oligonucleotide
uagaaagcaucuuccacuu

SEQ ID NO: 1699 - RNA, 19 nt, Artificial Sequence
  Description of Artificial Sequence: Synthetic oligonucleotide
guagaaagcaucuuccacu

SEQ ID NO: 1700 - RNA, 19 nt, Artificial Sequence
  Description of Artificial Sequence: Synthetic oligonucleotide
uguagaaagcaucuuccac

SEQ ID NO: 1701 - RNA, 19 nt, Artificial Sequence
  Description of Artificial Sequence: Synthetic oligonucleotide
uuguagaaagcaucuucca

SEQ ID NO: 1702 - RNA, 19 nt, Artificial Sequence
  Description of Artificial Sequence: Synthetic oligonucleotide
uuuguagaaagcaucuucc

SEQ ID NO: 1703 - RNA, 19 nt, Artificial Sequence
  Description of Artificial Sequence: Synthetic oligonucleotide
cuuuguagaaagcaucuuc

SEQ ID NO: 1704 - RNA, 19 nt, Artificial Sequence
  Description of Artificial Sequence: Synthetic oligonucleotide
ccuuuguagaaagcaucuu

SEQ ID NO: 1705 - RNA, 19 nt, Artificial Sequence
  Description of Artificial Sequence: Synthetic oligonucleotide
accuuuguagaaagcaucu

SEQ ID NO: 1706 - RNA, 19 nt, Artificial Sequence
  Description of Artificial Sequence: Synthetic oligonucleotide
caccuuuguagaaagcauc

SEQ ID NO: 1707 - RNA, 19 nt, Artificial Sequence
  Description of Artificial Sequence: Synthetic oligonucleotide
ucaccuuuguagaaagcau

SEQ ID NO: 1708 - RNA, 19 nt, Artificial Sequence
  Description of Artificial Sequence: Synthetic oligonucleotide
uucaccuuuguagaaagca

SEQ ID NO: 1709 - RNA, 19 nt, Artificial Sequence
  Description of Artificial Sequence: Synthetic oligonucleotide
guucaccuuuguagaaagc

SEQ ID NO: 1710 - RNA, 19 nt, Artificial Sequence
  Description of Artificial Sequence: Synthetic oligonucleotide
aguucaccuuuguagaaag

SEQ ID NO: 1711 - RNA, 19 nt, Artificial Sequence
  Description of Artificial Sequence: Synthetic oligonucleotide
gaguucaccuuuguagaaa

SEQ ID NO: 1712 - RNA, 19 nt, Artificial Sequence
  Description of Artificial Sequence: Synthetic oligonucleotide
ugaguucaccuuuguagaa

SEQ ID NO: 1713 - RNA, 19 nt, Artificial Sequence
  Description of Artificial Sequence: Synthetic oligonucleotide
cugaguucaccuuuguaga

SEQ ID NO: 1714 - RNA, 19 nt, Artificial Sequence
  Description of Artificial Sequence: Synthetic oligonucleotide
ccugaguucaccuuuguag

SEQ ID NO: 1715 - RNA, 19 nt, Artificial Sequence
  Description of Artificial Sequence: Synthetic oligonucleotide
gccugaguucaccuuugua

SEQ ID NO: 1716 - RNA, 19 nt, Artificial Sequence
  Description of Artificial Sequence: Synthetic oligonucleotide
agccugaguucaccuuugu

SEQ ID NO: 1717 - RNA, 19 nt, Artificial Sequence
  Description of Artificial Sequence: Synthetic oligonucleotide
cagccugaguucaccuuug

SEQ ID NO: 1718 - RNA, 19 nt, Artificial Sequence
  Description of Artificial Sequence: Synthetic oligonucleotide
ucagccugaguucaccuuu

SEQ ID NO: 1719 - RNA, 19 nt, Artificial Sequence
  Description of Artificial Sequence: Synthetic oligonucleotide
uucagccugaguucaccuu

SEQ ID NO: 1720 - RNA, 19 nt, Artificial Sequence
  Description of Artificial Sequence: Synthetic oligonucleotide
auucagccugaguucaccu

SEQ ID NO: 1721 - RNA, 19 nt, Artificial Sequence
  Description of Artificial Sequence: Synthetic oligonucleotide
cauucagccugaguucacc

SEQ ID NO: 1722 - RNA, 19 nt, Artificial Sequence
  Description of Artificial Sequence: Synthetic oligonucleotide
ucauucagccugaguucac

SEQ ID NO: 1723 - RNA, 19 nt, Artificial Sequence
  Description of Artificial Sequence: Synthetic oligonucleotide
cucauucagccugaguuca

SEQ ID NO: 1724 - RNA, 19 nt, Artificial Sequence
  Description of Artificial Sequence: Synthetic oligonucleotide
ccucauucagccugaguuc

SEQ ID NO: 1725 - RNA, 19 nt, Artificial Sequence
  Description of Artificial Sequence: Synthetic oligonucleotide
uccucauucagccugaguu

SEQ ID NO: 1726 - RNA, 19 nt, Artificial Sequence
  Description of Artificial Sequence: Synthetic oligonucleotide
uuccucauucagccugagu

SEQ ID NO: 1727 - RNA, 19 nt, Artificial Sequence
  Description of Artificial Sequence: Synthetic oligonucleotide
uuuccucauucagccugag

SEQ ID NO: 1728 - RNA, 19 nt, Artificial Sequence
  Description of Artificial Sequence: Synthetic oligonucleotide
uuuuccucauucagccuga

SEQ ID NO: 1729 - RNA, 19 nt, Artificial Sequence
  Description of Artificial Sequence: Synthetic oligonucleotide
uuuuuccucauucagccug

SEQ ID NO: 1730 - RNA, 19 nt, Artificial Sequence
  Description of Artificial Sequence: Synthetic oligonucleotide
auuuuuccucauucagccu

SEQ ID NO: 1731 - RNA, 19 nt, Artificial Sequence
  Description of Artificial Sequence: Synthetic oligonucleotide
aauuuuuccucauucagcc

SEQ ID NO: 1732 - RNA, 19 nt, Artificial Sequence
  Description of Artificial Sequence: Synthetic oligonucleotide
uaauuuuuccucauucagc

SEQ ID NO: 1733 - RNA, 19 nt, Artificial Sequence
  Description of Artificial Sequence: Synthetic oligonucleotide
auaauuuuuccucauucag

SEQ ID NO: 1734 - RNA, 19 nt, Artificial Sequence
  Description of Artificial Sequence: Synthetic oligonucleotide
cauaauuuuuccucauuca

SEQ ID NO: 1735 - RNA, 19 nt, Artificial Sequence
  Description of Artificial Sequence: Synthetic oligonucleotide
ccauaauuuuuccucauuc

SEQ ID NO: 1736 - RNA, 19 nt, Artificial Sequence
  Description of Artificial Sequence: Synthetic oligonucleotide
uccauaauuuuuccucauu

SEQ ID NO: 1737 - RNA, 19 nt, Artificial Sequence
  Description of Artificial Sequence: Synthetic oligonucleotide
uuccauaauuuuuccucau

SEQ ID NO: 1738 - RNA, 19 nt, Artificial Sequence
  Description of Artificial Sequence: Synthetic oligonucleotide
cuuccauaauuuuuccuca

SEQ ID NO: 1739 - RNA, 19 nt, Artificial Sequence
  Description of Artificial Sequence: Synthetic oligonucleotide
ucuuccauaauuuuuccuc

SEQ ID NO: 1740 - RNA, 19 nt, Artificial Sequence
  Description of Artificial Sequence: Synthetic oligonucleotide
uucuuccauaauuuuuccu

SEQ ID NO: 1741 - RNA, 19 nt, Artificial Sequence
  Description of Artificial Sequence: Synthetic oligonucleotide
uuucuuccauaauuuuucc

SEQ ID NO: 1742 - RNA, 19 nt, Artificial Sequence
  Description of Artificial Sequence: Synthetic oligonucleotide
uuuucuuccauaauuuuuc

SEQ ID NO: 1743 - RNA, 19 nt, Artificial Sequence
  Description of Artificial Sequence: Synthetic oligonucleotide
cuuuucuuccauaauuuuu

SEQ ID NO: 1744 - RNA, 19 nt, Artificial Sequence
  Description of Artificial Sequence: Synthetic oligonucleotide
gcuuuucuuccauaauuuu

SEQ ID NO: 1745 - RNA, 19 nt, Artificial Sequence
  Description of Artificial Sequence: Synthetic oligonucleotide
ugcuuuucuuccauaauuu

SEQ ID NO: 1746 - RNA, 19 nt, Artificial Sequence
  Description of Artificial Sequence: Synthetic oligonucleotide
cugcuuuucuuccauaauu

SEQ ID NO: 1747 - RNA, 19 nt, Artificial Sequence
  Description of Artificial Sequence: Synthetic oligonucleotide
ucugcuuuucuuccauaau

SEQ ID NO: 1748 - RNA, 19 nt, Artificial Sequence
  Description of Artificial Sequence: Synthetic oligonucleotide
uucugcuuuucuuccauaa

SEQ ID NO: 1749 - RNA, 19 nt, Artificial Sequence
  Description of Artificial Sequence: Synthetic oligonucleotide
guucugcuuuucuuccaua

SEQ ID NO: 1750 - RNA, 19 nt, Artificial Sequence
  Description of Artificial Sequence: Synthetic oligonucleotide
cguucugcuuuucuuccau

SEQ ID NO: 1751 - RNA, 19 nt, Artificial Sequence
  Description of Artificial Sequence: Synthetic oligonucleotide
ccguucugcuuuucuucca

SEQ ID NO: 1752 - RNA, 19 nt, Artificial Sequence
  Description of Artificial Sequence: Synthetic oligonucleotide
accguucugcuuuucuucc

SEQ ID NO: 1753 - RNA, 19 nt, Artificial Sequence
  Description of Artificial Sequence: Synthetic oligonucleotide
caccguucugcuuuucuuc

SEQ ID NO: 1754 - RNA, 19 nt, Artificial Sequence
  Description of Artificial Sequence: Synthetic oligonucleotide
ucaccguucugcuuuucuu

SEQ ID NO: 1755 - RNA, 19 nt, Artificial Sequence
  Description of Artificial Sequence: Synthetic oligonucleotide
uucaccguucugcuuuucu

SEQ ID NO: 1756 - RNA, 19 nt, Artificial Sequence
  Description of Artificial Sequence: Synthetic oligonucleotide
uuucaccguucugcuuuuc

SEQ ID NO: 1757 - RNA, 19 nt, Artificial Sequence
  Description of Artificial Sequence: Synthetic oligonucleotide
cuuucaccguucugcuuuu

SEQ ID NO: 1758 - RNA, 19 nt, Artificial Sequence
  Description of Artificial Sequence: Synthetic oligonucleotide
acuuucaccguucugcuuu

SEQ ID NO: 1759 - RNA, 19 nt, Artificial Sequence
  Description of Artificial Sequence: Synthetic oligonucleotide
cacuuucaccguucugcuu

SEQ ID NO: 1760 - RNA, 19 nt, Artificial Sequence
  Description of Artificial Sequence: Synthetic oligonucleotide
ccacuuucaccguucugcu

SEQ ID NO: 1761 - RNA, 19 nt, Artificial Sequence
  Description of Artificial Sequence: Synthetic oligonucleotide
cccacuuucaccguucugc

SEQ ID NO: 1762 - RNA, 19 nt, Artificial Sequence
  Description of Artificial Sequence: Synthetic oligonucleotide
ucccacuuucaccguucug

SEQ ID NO: 1763 - RNA, 19 nt, Artificial Sequence
  Description of Artificial Sequence: Synthetic oligonucleotide
cucccacuuucaccguucu

SEQ ID NO: 1764 - RNA, 19 nt, Artificial Sequence
  Description of Artificial Sequence: Synthetic oligonucleotide
ucucccacuuucaccguuc

SEQ ID NO: 1765 - RNA, 19 nt, Artificial Sequence
  Description of Artificial Sequence: Synthetic oligonucleotide
aucucccacuuucaccguu

SEQ ID NO: 1766 - RNA, 19 nt, Artificial Sequence
  Description of Artificial Sequence: Synthetic oligonucleotide
uaucucccacuuucaccgu

SEQ ID NO: 1767 - RNA, 19 nt, Artificial Sequence
  Description of Artificial Sequence: Synthetic oligonucleotide
guaucucccacuuucaccg

SEQ ID NO: 1768 - RNA, 19 nt, Artificial Sequence
  Description of Artificial Sequence: Synthetic oligonucleotide
uguaucucccacuuucacc

SEQ ID NO: 1769 - RNA, 19 nt, Artificial Sequence
  Description of Artificial Sequence: Synthetic oligonucleotide
auguaucucccacuuucac

SEQ ID NO: 1770 - RNA, 19 nt, Artificial Sequence
  Description of Artificial Sequence: Synthetic oligonucleotide
aauguaucucccacuuuca

SEQ ID NO: 1771 - RNA, 19 nt, Artificial Sequence
  Description of Artificial Sequence: Synthetic oligonucleotide
caauguaucucccacuuuc

SEQ ID NO: 1772 - RNA, 19 nt, Artificial Sequence
  Description of Artificial Sequence: Synthetic oligonucleotide
ccaauguaucucccacuuu

SEQ ID NO: 1773 - RNA, 19 nt, Artificial Sequence
  Description of Artificial Sequence: Synthetic oligonucleotide
uccaauguaucucccacuu

SEQ ID NO: 1774 - RNA, 19 nt, Artificial Sequence
  Description of Artificial Sequence: Synthetic oligonucleotide
auccaauguaucucccacu

SEQ ID NO: 1775 - RNA, 19 nt, Artificial Sequence
  Description of Artificial Sequence: Synthetic oligonucleotide
gauccaauguaucucccac

SEQ ID NO: 1776 - RNA, 19 nt, Artificial Sequence
  Description of Artificial Sequence: Synthetic oligonucleotide
agauccaauguaucuccca

SEQ ID NO: 1777 - RNA, 19 nt, Artificial Sequence
  Description of Artificial Sequence: Synthetic oligonucleotide
aagauccaauguaucuccc

SEQ ID NO: 1778 - RNA, 19 nt, Artificial Sequence
  Description of Artificial Sequence: Synthetic oligonucleotide
gaagauccaauguaucucc

SEQ ID NO: 1779 - RNA, 19 nt, Artificial Sequence
  Description of Artificial Sequence: Synthetic oligonucleotide
agaagauccaauguaucuc

SEQ ID NO: 1780 - RNA, 19 nt, Artificial Sequence
  Description of Artificial Sequence: Synthetic oligonucleotide
gagaagauccaauguaucu

SEQ ID NO: 1781 - RNA, 19 nt, Artificial Sequence
  Description of Artificial Sequence: Synthetic oligonucleotide
ugagaagauccaauguauc

SEQ ID NO: 1782 - RNA, 19 nt, Artificial Sequence
  Description of Artificial Sequence: Synthetic oligonucleotide
augagaagauccaauguau

SEQ ID NO: 1783 - RNA, 19 nt, Artificial Sequence
  Description of Artificial Sequence: Synthetic oligonucleotide
aaugagaagauccaaugua

SEQ ID NO: 1784 - RNA, 19 nt, Artificial Sequence
  Description of Artificial Sequence: Synthetic oligonucleotide
caaugagaagauccaaugu

SEQ ID NO: 1785 - RNA, 19 nt, Artificial Sequence
  Description of Artificial Sequence: Synthetic oligonucleotide
ccaaugagaagauccaaug

SEQ ID NO: 1786 - RNA, 19 nt, Artificial Sequence
  Description of Artificial Sequence: Synthetic oligonucleotide
uccaaugagaagauccaau

SEQ ID NO: 1787 - RNA, 19 nt, Artificial Sequence
  Description of Artificial Sequence: Synthetic oligonucleotide
cuccaaugagaagauccaa

SEQ ID NO: 1788 - RNA, 19 nt, Artificial Sequence
  Description of Artificial Sequence: Synthetic oligonucleotide
ucuccaaugagaagaucca

SEQ ID NO: 1789 - RNA, 19 nt, Artificial Sequence
  Description of Artificial Sequence: Synthetic oligonucleotide
cucuccaaugagaagaucc

SEQ ID NO: 1790 - RNA, 19 nt, Artificial Sequence
  Description of Artificial Sequence: Synthetic oligonucleotide
ccucuccaaugagaagauc

SEQ ID NO: 1791 - RNA, 19 nt, Artificial Sequence
  Description of Artificial Sequence: Synthetic oligonucleotide
uccucuccaaugagaagau

SEQ ID NO: 1792 - RNA, 19 nt, Artificial Sequence
  Description of Artificial Sequence: Synthetic oligonucleotide
auccucuccaaugagaaga

SEQ ID NO: 1793 - RNA, 19 nt, Artificial Sequence
  Description of Artificial Sequence: Synthetic oligonucleotide
uauccucuccaaugagaag

SEQ ID NO: 1794 - RNA, 19 nt, Artificial Sequence
  Description of Artificial Sequence: Synthetic oligonucleotide
uuauccucuccaaugagaa

SEQ ID NO: 1795 - RNA, 19 nt, Artificial Sequence
  Description of Artificial Sequence: Synthetic oligonucleotide
uuuauccucuccaaugaga

SEQ ID NO: 1796 - RNA, 19 nt, Artificial Sequence
  Description of Artificial Sequence: Synthetic oligonucleotide
cuuuauccucuccaaugag

SEQ ID NO: 1797 - RNA, 19 nt, Artificial Sequence
  Description of Artificial Sequence: Synthetic oligonucleotide
ucuuuauccucuccaauga

SEQ ID NO: 1798 - RNA, 19 nt, Artificial Sequence
  Description of Artificial Sequence: Synthetic oligonucleotide
uucuuuauccucuccaaug

SEQ ID NO: 1799 - RNA, 19 nt, Artificial Sequence
  Description of Artificial Sequence: Synthetic oligonucleotide
cuucuuuauccucuccaau

SEQ ID NO: 1800 - RNA, 19 nt, Artificial Sequence
  Description of Artificial Sequence: Synthetic oligonucleotide
gcuucuuuauccucuccaa

SEQ ID NO: 1801 - RNA, 19 nt, Artificial Sequence
  Description of Artificial Sequence: Synthetic oligonucleotide
ugcuucuuuauccucucca

SEQ ID NO: 1802 - RNA, 19 nt, Artificial Sequence
  Description of Artificial Sequence: Synthetic oligonucleotide
cugcuucuuuauccucucc

SEQ ID NO: 1803 - RNA, 19 nt, Artificial Sequence
  Description of Artificial Sequence: Synthetic oligonucleotide
ccugcuucuuuauccucuc

SEQ ID NO: 1804 - RNA, 19 nt, Artificial Sequence
  Description of Artificial Sequence: Synthetic oligonucleotide
uccugcuucuuuauccucu

SEQ ID NO: 1805 - RNA, 19 nt, Artificial Sequence
  Description of Artificial Sequence: Synthetic oligonucleotide
uuccugcuucuuuauccuc

SEQ ID NO: 1806 - RNA, 19 nt, Artificial Sequence
  Description of Artificial Sequence: Synthetic oligonucleotide
guuccugcuucuuuauccu

SEQ ID NO: 1807 - RNA, 19 nt, Artificial Sequence
  Description of Artificial Sequence: Synthetic oligonucleotide
uguuccugcuucuuuaucc

SEQ ID NO: 1808 - RNA, 19 nt, Artificial Sequence
  Description of Artificial Sequence: Synthetic oligonucleotide
cuguuccugcuucuuuauc

SEQ ID NO: 1809 - RNA, 19 nt, Artificial Sequence
  Description of Artificial Sequence: Synthetic oligonucleotide
ucuguuccugcuucuuuau

SEQ ID NO: 1810 - RNA, 19 nt, Artificial Sequence
  Description of Artificial Sequence: Synthetic oligonucleotide
cucuguuccugcuucuuua

SEQ ID NO: 1811 - RNA, 19 nt, Artificial Sequence
  Description of Artificial Sequence: Synthetic oligonucleotide
ucucuguuccugcuucuuu

SEQ ID NO: 1812 - RNA, 19 nt, Artificial Sequence
  Description of Artificial Sequence: Synthetic oligonucleotide
gucucuguuccugcuucuu

SEQ ID NO: 1813 - RNA, 19 nt, Artificial Sequence
  Description of Artificial Sequence: Synthetic oligonucleotide
ugucucuguuccugcuucu

SEQ ID NO: 1814 - RNA, 19 nt, Artificial Sequence
  Description of Artificial Sequence: Synthetic oligonucleotide
cugucucuguuccugcuuc

SEQ ID NO: 1815 - RNA, 19 nt, Artificial Sequence
  Description of Artificial Sequence: Synthetic oligonucleotide
acugucucuguuccugcuu

SEQ ID NO: 1816 - RNA, 19 nt, Artificial Sequence
  Description of Artificial Sequence: Synthetic oligonucleotide
aacugucucuguuccugcu

SEQ ID NO: 1817 - RNA, 19 nt, Artificial Sequence
  Description of Artificial Sequence: Synthetic oligonucleotide
uaacugucucuguuccugc

SEQ ID NO: 1818 - RNA, 19 nt, Artificial Sequence
  Description of Artificial Sequence: Synthetic oligonucleotide
auaacugucucuguuccug

SEQ ID NO: 1819 - RNA, 19 nt, Artificial Sequence
  Description of Artificial Sequence: Synthetic oligonucleotide
cauaacugucucuguuccu

SEQ ID NO: 1820 - RNA, 19 nt, Artificial Sequence
  Description of Artificial Sequence: Synthetic oligonucleotide
gcauaacugucucuguucc

SEQ ID NO: 1821 - RNA, 19 nt, Artificial Sequence
  Description of Artificial Sequence: Synthetic oligonucleotide
cgcauaacugucucuguuc

SEQ ID NO: 1822 - RNA, 19 nt, Artificial Sequence
  Description of Artificial Sequence: Synthetic oligonucleotide
ccgcauaacugucucuguu

SEQ ID NO: 1823 - RNA, 19 nt, Artificial Sequence
  Description of Artificial Sequence: Synthetic oligonucleotide
uccgcauaacugucucugu

SEQ ID NO: 1824 - RNA, 19 nt, Artificial Sequence
  Description of Artificial Sequence: Synthetic oligonucleotide
auccgcauaacugucucug

SEQ ID NO: 1825 - RNA, 19 nt, Artificial Sequence
  Description of Artificial Sequence: Synthetic oligonucleotide
aauccgcauaacugucucu

SEQ ID NO: 1826 - RNA, 19 nt, Artificial Sequence
  Description of Artificial Sequence: Synthetic oligonucleotide
gaauccgcauaacugucuc

SEQ ID NO: 1827 - RNA, 19 nt, Artificial Sequence
  Description of Artificial Sequence: Synthetic oligonucleotide
agaauccgcauaacugucu

SEQ ID NO: 1828 - RNA, 19 nt, Artificial Sequence
  Description of Artificial Sequence: Synthetic oligonucleotide
gagaauccgcauaacuguc

SEQ ID NO: 1829 - RNA, 19 nt, Artificial Sequence
  Description of Artificial Sequence: Synthetic oligonucleotide
agagaauccgcauaacugu

SEQ ID NO: 1830 - RNA, 19 nt, Artificial Sequence
  Description of Artificial Sequence: Synthetic oligonucleotide
aagagaauccgcauaacug

SEQ ID NO: 1831 - RNA, 19 nt, Artificial Sequence
  Description of Artificial Sequence: Synthetic oligonucleotide
caagagaauccgcauaacu

SEQ ID NO: 1832 - RNA, 19 nt, Artificial Sequence
  Description of Artificial Sequence: Synthetic oligonucleotide
ucaagagaauccgcauaac

SEQ ID NO: 1833 - RNA, 19 nt, Artificial Sequence
  Description of Artificial Sequence: Synthetic oligonucleotide
uucaagagaauccgcauaa

SEQ ID NO: 1834 - RNA, 19 nt, Artificial Sequence
  Description of Artificial Sequence: Synthetic oligonucleotide
uuucaagagaauccgcaua

SEQ ID NO: 1835 - RNA, 19 nt, Artificial Sequence
  Description of Artificial Sequence: Synthetic oligonucleotide
uuuucaagagaauccgcau

SEQ ID NO: 1836 - RNA, 19 nt, Artificial Sequence
  Description of Artificial Sequence: Synthetic oligonucleotide
uuuuucaagagaauccgca

SEQ ID NO: 1837 - RNA, 19 nt, Artificial Sequence
  Description of Artificial Sequence: Synthetic oligonucleotide
uuuuuucaagagaauccgc

SEQ ID NO: 1838 - RNA, 19 nt, Artificial Sequence
  Description of Artificial Sequence: Synthetic oligonucleotide
cuuuuuucaagagaauccg

SEQ ID NO: 1839 - RNA, 19 nt, Artificial Sequence
  Description of Artificial Sequence: Synthetic oligonucleotide
acuuuuuucaagagaaucc

SEQ ID NO: 1840 - RNA, 19 nt, Artificial Sequence
  Description of Artificial Sequence: Synthetic oligonucleotide
cacuuuuuucaagagaauc

SEQ ID NO: 1841 - RNA, 19 nt, Artificial Sequence
  Description of Artificial Sequence: Synthetic oligonucleotide
acacuuuuuucaagagaau

SEQ ID NO: 1842 - RNA, 19 nt, Artificial Sequence
  Description of Artificial Sequence: Synthetic oligonucleotide
aacacuuuuuucaagagaa

SEQ ID NO: 1843 - RNA, 19 nt, Artificial Sequence
  Description of Artificial Sequence: Synthetic oligonucleotide
aaacacuuuuuucaagaga

SEQ ID NO: 1844 - RNA, 19 nt, Artificial Sequence
  Description of Artificial Sequence: Synthetic oligonucleotide
caaacacuuuuuucaagag

SEQ ID NO: 1845 - RNA, 19 nt, Artificial Sequence
  Description of Artificial Sequence: Synthetic oligonucleotide
ucaaacacuuuuuucaaga

SEQ ID NO: 1846 - RNA, 19 nt, Artificial Sequence
  Description of Artificial Sequence: Synthetic oligonucleotide
uucaaacacuuuuuucaag

SEQ ID NO: 1847 - RNA, 19 nt, Artificial Sequence
  Description of Artificial Sequence: Synthetic oligonucleotide
cuucaaacacuuuuuucaa

SEQ ID NO: 1848 - RNA, 19 nt, Artificial Sequence
  Description of Artificial Sequence: Synthetic oligonucleotide
ucuucaaacacuuuuuuca

SEQ ID NO: 1849 - RNA, 19 nt, Artificial Sequence
  Description of Artificial Sequence: Synthetic oligonucleotide
cucuucaaacacuuuuuuc

SEQ ID NO: 1850 - RNA, 19 nt, Artificial Sequence
  Description of Artificial Sequence: Synthetic oligonucleotide
ucucuucaaacacuuuuuu

SEQ ID NO: 1851 - RNA, 19 nt, Artificial Sequence
  Description of Artificial Sequence: Synthetic oligonucleotide
uucucuucaaacacuuuuu

SEQ ID NO: 1852 - RNA, 19 nt, Artificial Sequence
  Description of Artificial Sequence: Synthetic oligonucleotide
cuucucuucaaacacuuuu

SEQ ID NO: 1853 - RNA, 19 nt, Artificial Sequence
  Description of Artificial Sequence: Synthetic oligonucleotide
ucuucucuucaaacacuuu

SEQ ID NO: 1854 - RNA, 19 nt, Artificial Sequence
  Description of Artificial Sequence: Synthetic oligonucleotide
gucuucucuucaaacacuu

SEQ ID NO: 1855 - RNA, 19 nt, Artificial Sequence
  Description of Artificial Sequence: Synthetic oligonucleotide
agucuucucuucaaacacu

SEQ ID NO: 1856 - RNA, 19 nt, Artificial Sequence
  Description of Artificial Sequence: Synthetic oligonucleotide
cagucuucucuucaaacac

SEQ ID NO: 1857 - RNA, 19 nt, Artificial Sequence
  Description of Artificial Sequence: Synthetic oligonucleotide
ucagucuucucuucaaaca

SEQ ID NO: 1858 - RNA, 19 nt, Artificial Sequence
  Description of Artificial Sequence: Synthetic oligonucleotide
uucagucuucucuucaaac

SEQ ID NO: 1859 - RNA, 19 nt, Artificial Sequence
  Description of Artificial Sequence: Synthetic oligonucleotide
uuucagucuucucuucaaa

SEQ ID NO: 1860 - RNA, 19 nt, Artificial Sequence
  Description of Artificial Sequence: Synthetic oligonucleotide
cuuucagucuucucuucaa

SEQ ID NO: 1861 - RNA, 19 nt, Artificial Sequence
  Description of Artificial Sequence: Synthetic oligonucleotide
acuuucagucuucucuuca

SEQ ID NO: 1862 - RNA, 19 nt, Artificial Sequence
  Description of Artificial Sequence: Synthetic oligonucleotide
cacuuucagucuucucuuc

SEQ ID NO: 1863 - RNA, 19 nt, Artificial Sequence
  Description of Artificial Sequence: Synthetic oligonucleotide
ucacuuucagucuucucuu

SEQ ID NO: 1864 - RNA, 19 nt, Artificial Sequence
  Description of Artificial Sequence: Synthetic oligonucleotide
uucacuuucagucuucucu

SEQ ID NO: 1865 - RNA, 19 nt, Artificial Sequence
  Description of Artificial Sequence: Synthetic oligonucleotide
uuucacuuucagucuucuc

SEQ ID NO: 1866 - RNA, 19 nt, Artificial Sequence
  Description of Artificial Sequence: Synthetic oligonucleotide
uuuucacuuucagucuucu

SEQ ID NO: 1867 - RNA, 19 nt, Artificial Sequence
  Description of Artificial Sequence: Synthetic oligonucleotide
uuuuucacuuucagucuuc

SEQ ID NO: 1868 - RNA, 19 nt, Artificial Sequence
  Description of Artificial Sequence: Synthetic oligonucleotide
auuuuucacuuucagucuu

SEQ ID NO: 1869 - RNA, 19 nt, Artificial Sequence
  Description of Artificial Sequence: Synthetic oligonucleotide
uauuuuucacuuucagucu

SEQ ID NO: 1870 - RNA, 19 nt, Artificial Sequence
  Description of Artificial Sequence: Synthetic oligonucleotide
guauuuuucacuuucaguc

SEQ ID NO: 1871 - RNA, 19 nt, Artificial Sequence
  Description of Artificial Sequence: Synthetic oligonucleotide
uguauuuuucacuuucagu

SEQ ID NO: 1872 - RNA, 19 nt, Artificial Sequence
  Description of Artificial Sequence: Synthetic oligonucleotide
cuguauuuuucacuuucag

SEQ ID NO: 1873 - RNA, 19 nt, Artificial Sequence
  Description of Artificial Sequence: Synthetic oligonucleotide
ucuguauuuuucacuuuca

SEQ ID NO: 1874 - RNA, 19 nt, Artificial Sequence
  Description of Artificial Sequence: Synthetic oligonucleotide
cucuguauuuuucacuuuc

SEQ ID NO: 1875 - RNA, 19 nt, Artificial Sequence
  Description of Artificial Sequence: Synthetic oligonucleotide
acucuguauuuuucacuuu

SEQ ID NO: 1876 - RNA, 19 nt, Artificial Sequence
  Description of Artificial Sequence: Synthetic oligonucleotide
cacucuguauuuuucacuu

SEQ ID NO: 1877 - RNA, 19 nt, Artificial Sequence
  Description of Artificial Sequence: Synthetic oligonucleotide
ccacucuguauuuuucacu

SEQ ID NO: 1878 - RNA, 19 nt, Artificial Sequence
  Description of Artificial Sequence: Synthetic oligonucleotide
accacucuguauuuuucac

SEQ ID NO: 1879 - RNA, 19 nt, Artificial Sequence
  Description of Artificial Sequence: Synthetic oligonucleotide
caccacucuguauuuuuca

SEQ ID NO: 1880 - RNA, 19 nt, Artificial Sequence
  Description of Artificial Sequence: Synthetic oligonucleotide
acaccacucuguauuuuuc

SEQ ID NO: 1881 - RNA, 19 nt, Artificial Sequence
  Description of Artificial Sequence: Synthetic oligonucleotide
aacaccacucuguauuuuu

SEQ ID NO: 1882 - RNA, 19 nt, Artificial Sequence
  Description of Artificial Sequence: Synthetic oligonucleotide
uaacaccacucuguauuuu

SEQ ID NO: 1883 - RNA, 19 nt, Artificial Sequence
  Description of Artificial Sequence: Synthetic oligonucleotide
guaacaccacucuguauuu

SEQ ID NO: 1884 - RNA, 19 nt, Artificial Sequence
  Description of Artificial Sequence: Synthetic oligonucleotide
cguaacaccacucuguauu

SEQ ID NO: 1885 - RNA, 19 nt, Artificial Sequence
  Description of Artificial Sequence: Synthetic oligonucleotide
ccguaacaccacucuguau

SEQ ID NO: 1886 - RNA, 19 nt, Artificial Sequence
  Description of Artificial Sequence: Synthetic oligonucleotide
gccguaacaccacucugua

SEQ ID NO: 1887 - RNA, 19 nt, Artificial Sequence
  Description of Artificial Sequence: Synthetic oligonucleotide
cgccguaacaccacucugu

SEQ ID NO: 1888 - RNA, 19 nt, Artificial Sequence
  Description of Artificial Sequence: Synthetic oligonucleotide
ccgccguaacaccacucug

SEQ ID NO: 1889 - RNA, 19 nt, Artificial Sequence
  Description of Artificial Sequence: Synthetic oligonucleotide
accgccguaacaccacucu

SEQ ID NO: 1890 - RNA, 19 nt, Artificial Sequence
  Description of Artificial Sequence: Synthetic oligonucleotide
caccgccguaacaccacuc

SEQ ID NO: 1891 - RNA, 19 nt, Artificial Sequence
  Description of Artificial Sequence: Synthetic oligonucleotide
ccaccgccguaacaccacu

SEQ ID NO: 1892 - RNA, 19 nt, Artificial Sequence
  Description of Artificial Sequence: Synthetic oligonucleotide
uccaccgccguaacaccac

SEQ ID NO: 1893 - RNA, 19 nt, Artificial Sequence
  Description of Artificial Sequence: Synthetic oligonucleotide
uuccaccgccguaacacca

SEQ ID NO: 1894 - RNA, 19 nt, Artificial Sequence
  Description of Artificial Sequence: Synthetic oligonucleotide
uuuccaccgccguaacacc

SEQ ID NO: 1895 - RNA, 19 nt, Artificial Sequence
  Description of Artificial Sequence: Synthetic oligonucleotide
uuuuccaccgccguaacac

SEQ ID NO: 1896 - RNA, 19 nt, Artificial Sequence
  Description of Artificial Sequence: Synthetic oligonucleotide
cuuuuccaccgccguaaca

SEQ ID NO: 1897 - RNA, 19 nt, Artificial Sequence
  Description of Artificial Sequence: Synthetic oligonucleotide
acuuuuccaccgccguaac

SEQ ID NO: 1898 - RNA, 19 nt, Artificial Sequence
  Description of Artificial Sequence: Synthetic oligonucleotide
aacuuuuccaccgccguaa

SEQ ID NO: 1899 - RNA, 19 nt, Artificial Sequence
  Description of Artificial Sequence: Synthetic oligonucleotide
aaacuuuuccaccgccgua

SEQ ID NO: 1900 - RNA, 19 nt, Artificial Sequence
  Description of Artificial Sequence: Synthetic oligonucleotide
uaaacuuuuccaccgccgu

SEQ ID NO: 1901 - RNA, 19 nt, Artificial Sequence
  Description of Artificial Sequence: Synthetic oligonucleotide
uuaaacuuuuccaccgccg

SEQ ID NO: 1902 - RNA, 19 nt, Artificial Sequence
  Description of Artificial Sequence: Synthetic oligonucleotide
uuuaaacuuuuccaccgcc

SEQ ID NO: 1903 - RNA, 19 nt, Artificial Sequence
  Description of Artificial Sequence: Synthetic oligonucleotide
cuuuaaacuuuuccaccgc

SEQ ID NO: 1904 - RNA, 19 nt, Artificial Sequence
  Description of Artificial Sequence: Synthetic oligonucleotide
acuuuaaacuuuuccaccg

SEQ ID NO: 1905 - RNA, 19 nt, Artificial Sequence
  Description of Artificial Sequence: Synthetic oligonucleotide
aacuuuaaacuuuuccacc

SEQ ID NO: 1906 - RNA, 19 nt, Artificial Sequence
  Description of Artificial Sequence: Synthetic oligonucleotide
caacuuuaaacuuuuccac

SEQ ID NO: 1907 - RNA, 19 nt, Artificial Sequence
  Description of Artificial Sequence: Synthetic oligonucleotide
gcaacuuuaaacuuuucca

SEQ ID NO: 1908 - RNA, 19 nt, Artificial Sequence
  Description of Artificial Sequence: Synthetic oligonucleotide
ggcaacuuuaaacuuuucc

SEQ ID NO: 1909 - RNA, 19 nt, Artificial Sequence
  Description of Artificial Sequence: Synthetic oligonucleotide
aggcaacuuuaaacuuuuc

SEQ ID NO: 1910 - RNA, 19 nt, Artificial Sequence
  Description of Artificial Sequence: Synthetic oligonucleotide
uaggcaacuuuaaacuuuu

SEQ ID NO: 1911 - RNA, 19 nt, Artificial Sequence
  Description of Artificial Sequence: Synthetic oligonucleotide
uuaggcaacuuuaaacuuu

SEQ ID NO: 1912 - RNA, 19 nt, Artificial Sequence
  Description of Artificial Sequence: Synthetic oligonucleotide
cuuaggcaacuuuaaacuu

SEQ ID NO: 1913 - RNA, 19 nt, Artificial Sequence
  Description of Artificial Sequence: Synthetic oligonucleotide
ucuuaggcaacuuuaaacu

SEQ ID NO: 1914 - RNA, 19 nt, Artificial Sequence
  Description of Artificial Sequence: Synthetic oligonucleotide
uucuuaggcaacuuuaaac

SEQ ID NO: 1915 - RNA, 19 nt, Artificial Sequence
  Description of Artificial Sequence: Synthetic oligonucleotide
cuucuuaggcaacuuuaaa

SEQ ID NO: 1916 - RNA, 19 nt, Artificial Sequence
  Description of Artificial Sequence: Synthetic oligonucleotide
ucuucuuaggcaacuuuaa

SEQ ID NO: 1917 - RNA, 19 nt, Artificial Sequence
  Description of Artificial Sequence: Synthetic oligonucleotide
cucuucuuaggcaacuuua

SEQ ID NO: 1918 - RNA, 19 nt, Artificial Sequence
  Description of Artificial Sequence: Synthetic oligonucleotide
ucucuucuuaggcaacuuu

SEQ ID NO: 1919 - RNA, 19 nt, Artificial Sequence
  Description of Artificial Sequence: Synthetic oligonucleotide
uucucuucuuaggcaacuu

SEQ ID NO: 1920 - RNA, 19 nt, Artificial Sequence
  Description of Artificial Sequence: Synthetic oligonucleotide
auucucuucuuaggcaacu

SEQ ID NO: 1921 - RNA, 19 nt, Artificial Sequence
  Description of Artificial Sequence: Synthetic oligonucleotide
cauucucuucuuaggcaac

SEQ ID NO: 1922 - RNA, 19 nt, Artificial Sequence
  Description of Artificial Sequence: Synthetic oligonucleotide
acauucucuucuuaggcaa

SEQ ID NO: 1923 - RNA, 19 nt, Artificial Sequence
  Description of Artificial Sequence: Synthetic oligonucleotide
gacauucucuucuuaggca

SEQ ID NO: 1924 - RNA, 19 nt, Artificial Sequence
  Description of Artificial Sequence: Synthetic oligonucleotide
agacauucucuucuuaggc

SEQ ID NO: 1925 - RNA, 19 nt, Artificial Sequence
  Description of Artificial Sequence: Synthetic oligonucleotide
uagacauucucuucuuagg

SEQ ID NO: 1926 - RNA, 19 nt, Artificial Sequence
  Description of Artificial Sequence: Synthetic oligonucleotide
uuagacauucucuucuuag

SEQ ID NO: 1927 - RNA, 19 nt, Artificial Sequence
  Description of Artificial Sequence: Synthetic oligonucleotide
uuuagacauucucuucuua

SEQ ID NO: 1928 - RNA, 19 nt, Artificial Sequence
  Description of Artificial Sequence: Synthetic oligonucleotide
auuuagacauucucuucuu

SEQ ID NO: 1929 - RNA, 19 nt, Artificial Sequence
  Description of Artificial Sequence: Synthetic oligonucleotide
uauuuagacauucucuucu

SEQ ID NO: 1930 - RNA, 19 nt, Artificial Sequence
  Description of Artificial Sequence: Synthetic oligonucleotide
uuauuuagacauucucuuc

SEQ ID NO: 1931 - RNA, 19 nt, Artificial Sequence
  Description of Artificial Sequence: Synthetic oligonucleotide
uuuauuuagacauucucuu

SEQ ID NO: 1932 - RNA, 19 nt, Artificial Sequence
  Description of Artificial Sequence: Synthetic oligonucleotide
auuuauuuagacauucucu

SEQ ID NO: 1933 - RNA, 19 nt, Artificial Sequence
  Description of Artificial Sequence: Synthetic oligonucleotide
cauuuauuuagacauucuc

SEQ ID NO: 1934 - RNA, 19 nt, Artificial Sequence
  Description of Artificial Sequence: Synthetic oligonucleotide
ccauuuauuuagacauucu

SEQ ID NO: 1935 - RNA, 19 nt, Artificial Sequence
  Description of Artificial Sequence: Synthetic oligonucleotide
uccauuuauuuagacauuc

SEQ ID NO: 1936 - RNA, 19 nt, Artificial Sequence
  Description of Artificial Sequence: Synthetic oligonucleotide
auccauuuauuuagacauu

SEQ ID NO: 1937 - RNA, 19 nt, Artificial Sequence
  Description of Artificial Sequence: Synthetic oligonucleotide
aauccauuuauuuagacau

SEQ ID NO: 1938 - RNA, 19 nt, Artificial Sequence
  Description of Artificial Sequence: Synthetic oligonucleotide
caauccauuuauuuagaca

SEQ ID NO: 1939 - RNA, 19 nt, Artificial Sequence
  Description of Artificial Sequence: Synthetic oligonucleotide
gcaauccauuuauuuagac

SEQ ID NO: 1940 - RNA, 19 nt, Artificial Sequence
  Description of Artificial Sequence: Synthetic oligonucleotide
agcaauccauuuauuuaga

SEQ ID NO: 1941 - RNA, 19 nt, Artificial Sequence
  Description of Artificial Sequence: Synthetic oligonucleotide
aagcaauccauuuauuuag

SEQ ID NO: 1942 - RNA, 19 nt, Artificial Sequence
  Description of Artificial Sequence: Synthetic oligonucleotide
aaagcaauccauuuauuua

SEQ ID NO: 1943 - RNA, 19 nt, Artificial Sequence
  Description of Artificial Sequence: Synthetic oligonucleotide
aaaagcaauccauuuauuu

SEQ ID NO: 1944 - RNA, 19 nt, Artificial Sequence
  Description of Artificial Sequence: Synthetic oligonucleotide
aaaaagcaauccauuuauu

SEQ ID NO: 1945 - RNA, 19 nt, Artificial Sequence
  Description of Artificial Sequence: Synthetic oligonucleotide
uaaaaagcaauccauuuau

SEQ ID NO: 1946 - RNA, 19 nt, Artificial Sequence
  Description of Artificial Sequence: Synthetic oligonucleotide
cuaaaaagcaauccauuua

SEQ ID NO: 1947 - RNA, 19 nt, Artificial Sequence
  Description of Artificial Sequence: Synthetic oligonucleotide
gcuaaaaagcaauccauuu

SEQ ID NO: 1948 - RNA, 19 nt, Artificial Sequence
  Description of Artificial Sequence: Synthetic oligonucleotide
ugcuaaaaagcaauccauu

SEQ ID NO: 1949 - RNA, 19 nt, Artificial Sequence
  Description of Artificial Sequence: Synthetic oligonucleotide
uugcuaaaaagcaauccau

SEQ ID NO: 1950 - RNA, 19 nt, Artificial Sequence
  Description of Artificial Sequence: Synthetic oligonucleotide
auugcuaaaaagcaaucca

SEQ ID NO: 1951 - RNA, 19 nt, Artificial Sequence
  Description of Artificial Sequence: Synthetic oligonucleotide
uauugcuaaaaagcaaucc

SEQ ID NO: 1952 - RNA, 19 nt, Artificial Sequence
  Description of Artificial Sequence: Synthetic oligonucleotide
cuauugcuaaaaagcaauc

SEQ ID NO: 1953 - RNA, 19 nt, Artificial Sequence
  Description of Artificial Sequence: Synthetic oligonucleotide
ucuauugcuaaaaagcaau

SEQ ID NO: 1954 - RNA, 19 nt, Artificial Sequence
  Description of Artificial Sequence: Synthetic oligonucleotide
cucuauugcuaaaaagcaa

SEQ ID NO: 1955 - RNA, 19 nt, Artificial Sequence
  Description of Artificial Sequence: Synthetic oligonucleotide
gcucuauugcuaaaaagca

SEQ ID NO: 1956 - RNA, 19 nt, Artificial Sequence
  Description of Artificial Sequence: Synthetic oligonucleotide
agcucuauugcuaaaaagc

SEQ ID NO: 1957 - RNA, 19 nt, Artificial Sequence
  Description of Artificial Sequence: Synthetic oligonucleotide
cagcucuauugcuaaaaag

SEQ ID NO: 1958 - RNA, 19 nt, Artificial Sequence
  Description of Artificial Sequence: Synthetic oligonucleotide
gcagcucuauugcuaaaaa

SEQ ID NO: 1959 - RNA, 19 nt, Artificial Sequence
  Description of Artificial Sequence: Synthetic oligonucleotide
agcagcucuauugcuaaaa

SEQ ID NO: 1960 - RNA, 19 nt, Artificial Sequence
  Description of Artificial Sequence: Synthetic oligonucleotide
aagcagcucuauugcuaaa

SEQ ID NO: 1961 - RNA, 19 nt, Artificial Sequence
  Description of Artificial Sequence: Synthetic oligonucleotide
aaagcagcucuauugcuaa

SEQ ID NO: 1962 - RNA, 19 nt, Artificial Sequence
  Description of Artificial Sequence: Synthetic oligonucleotide
gaaagcagcucuauugcua

SEQ ID NO: 1963 - RNA, 19 nt, Artificial Sequence
  Description of Artificial Sequence: Synthetic oligonucleotide
agaaagcagcucuauugcu

SEQ ID NO: 1964 - RNA, 19 nt, Artificial Sequence
  Description of Artificial Sequence: Synthetic oligonucleotide
uagaaagcagcucuauugc

SEQ ID NO: 1965 - RNA, 19 nt, Artificial Sequence
  Description of Artificial Sequence: Synthetic oligonucleotide
cuagaaagcagcucuauug

SEQ ID NO: 1966 - RNA, 19 nt, Artificial Sequence
  Description of Artificial Sequence: Synthetic oligonucleotide
acuagaaagcagcucuauu

SEQ ID NO: 1967 - RNA, 19 nt, Artificial Sequence
  Description of Artificial Sequence: Synthetic oligonucleotide
cacuagaaagcagcucuau

SEQ ID NO: 1968 - RNA, 19 nt, Artificial Sequence
  Description of Artificial Sequence: Synthetic oligonucleotide
ccacuagaaagcagcucua

SEQ ID NO: 1969 - RNA, 19 nt, Artificial Sequence
  Description of Artificial Sequence: Synthetic oligonucleotide
accacuagaaagcagcucu

SEQ ID NO: 1970 - RNA, 19 nt, Artificial Sequence
  Description of Artificial Sequence: Synthetic oligonucleotide
uaccacuagaaagcagcuc

SEQ ID NO: 1971 - RNA, 19 nt, Artificial Sequence
  Description of Artificial Sequence: Synthetic oligonucleotide
uuaccacuagaaagcagcu

SEQ ID NO: 1972 - RNA, 19 nt, Artificial Sequence
  Description of Artificial Sequence: Synthetic oligonucleotide
uuuaccacuagaaagcagc

SEQ ID NO: 1973 - RNA, 19 nt, Artificial Sequence
  Description of Artificial Sequence: Synthetic oligonucleotide
cuuuaccacuagaaagcag

SEQ ID NO: 1974 - RNA, 19 nt, Artificial Sequence
  Description of Artificial Sequence: Synthetic oligonucleotide
ccuuuaccacuagaaagca

SEQ ID NO: 1975 - RNA, 19 nt, Artificial Sequence
  Description of Artificial Sequence: Synthetic oligonucleotide
uccuuuaccacuagaaagc

SEQ ID NO: 1976 - RNA, 19 nt, Artificial Sequence
  Description of Artificial Sequence: Synthetic oligonucleotide
uuccuuuaccacuagaaag

SEQ ID NO: 1977 - RNA, 19 nt, Artificial Sequence
  Description of Artificial Sequence: Synthetic oligonucleotide
cuuccuuuaccacuagaaa

SEQ ID NO: 1978 - RNA, 19 nt, Artificial Sequence
  Description of Artificial Sequence: Synthetic oligonucleotide
ccuuccuuuaccacuagaa

SEQ ID NO: 1979 - RNA, 19 nt, Artificial Sequence
  Description of Artificial Sequence: Synthetic oligonucleotide
cccuuccuuuaccacuaga

SEQ ID NO: 1980 - RNA, 19 nt, Artificial Sequence
  Description of Artificial Sequence: Synthetic oligonucleotide
ccccuuccuuuaccacuag

SEQ ID NO: 1981 - RNA, 19 nt, Artificial Sequence
  Description of Artificial Sequence: Synthetic oligonucleotide
accccuuccuuuaccacua

SEQ ID NO: 1982 - RNA, 19 nt, Artificial Sequence
  Description of Artificial Sequence: Synthetic oligonucleotide
gaccccuuccuuuaccacu

SEQ ID NO: 1983 - RNA, 19 nt, Artificial Sequence
  Description of Artificial Sequence: Synthetic oligonucleotide
ugaccccuuccuuuaccac

SEQ ID NO: 1984 - RNA, 19 nt, Artificial Sequence
  Description of Artificial Sequence: Synthetic oligonucleotide
gugaccccuuccuuuacca

SEQ ID NO: 1985 - RNA, 19 nt, Artificial Sequence
  Description of Artificial Sequence: Synthetic oligonucleotide
ggugaccccuuccuuuacc

SEQ ID NO: 1986 - RNA, 19 nt, Artificial Sequence
  Description of Artificial Sequence: Synthetic oligonucleotide
aggugaccccuuccuuuac

SEQ ID NO: 1987 - RNA, 19 nt, Artificial Sequence
  Description of Artificial Sequence: Synthetic oligonucleotide
caggugaccccuuccuuua

SEQ ID NO: 1988 - RNA, 19 nt, Artificial Sequence
  Description of Artificial Sequence: Synthetic oligonucleotide
ucaggugaccccuuccuuu

SEQ ID NO: 1989 - RNA, 19 nt, Artificial Sequence
  Description of Artificial Sequence: Synthetic oligonucleotide
uucaggugaccccuuccuu

SEQ ID NO: 1990 - RNA, 19 nt, Artificial Sequence
  Description of Artificial Sequence: Synthetic oligonucleotide
uuucaggugaccccuuccu

SEQ ID NO: 1991 - RNA, 19 nt, Artificial Sequence
  Description of Artificial Sequence: Synthetic oligonucleotide
uuuucaggugaccccuucc

SEQ ID NO: 1992 - RNA, 19 nt, Artificial Sequence
  Description of Artificial Sequence: Synthetic oligonucleotide
uuuuucaggugaccccuuc

SEQ ID NO: 1993 - RNA, 19 nt, Artificial Sequence
  Description of Artificial Sequence: Synthetic oligonucleotide
auuuuucaggugaccccuu

SEQ ID NO: 1994 - RNA, 19 nt, Artificial Sequence
  Description of Artificial Sequence: Synthetic oligonucleotide
uauuuuucaggugaccccu

SEQ ID NO: 1995 - RNA, 19 nt, Artificial Sequence
  Description of Artificial Sequence: Synthetic oligonucleotide
cuauuuuucaggugacccc

SEQ ID NO: 1996 - RNA, 19 nt, Artificial Sequence
  Description of Artificial Sequence: Synthetic oligonucleotide
ccuauuuuucaggugaccc

SEQ ID NO: 1997 - RNA, 19 nt, Artificial Sequence
  Description of Artificial Sequence: Synthetic oligonucleotide
uccuauuuuucaggugacc

SEQ ID NO: 1998 - RNA, 19 nt, Artificial Sequence
  Description of Artificial Sequence: Synthetic oligonucleotide
guccuauuuuucaggugac

SEQ ID NO: 1999 - RNA, 19 nt, Artificial Sequence
  Description of Artificial Sequence: Synthetic oligonucleotide
uguccuauuuuucagguga

SEQ ID NO: 2000 - RNA, 19 nt, Artificial Sequence
  Description of Artificial Sequence: Synthetic oligonucleotide
auguccuauuuuucaggug

SEQ ID NO: 2001 - RNA, 19 nt, Artificial Sequence
  Description of Artificial Sequence: Synthetic oligonucleotide
aauguccuauuuuucaggu

SEQ ID NO: 2002 - RNA, 19 nt, Artificial Sequence
  Description of Artificial Sequence: Synthetic oligonucleotide
aaauguccuauuuuucagg

SEQ ID NO: 2003 - RNA, 19 nt, Artificial Sequence
  Description of Artificial Sequence: Synthetic oligonucleotide
aaaauguccuauuuuucag

SEQ ID NO: 2004 - RNA, 19 nt, Artificial Sequence
  Description of Artificial Sequence: Synthetic oligonucleotide
aaaaauguccuauuuuuca

SEQ ID NO: 2005 - RNA, 19 nt, Artificial Sequence
  Description of Artificial Sequence: Synthetic oligonucleotide
uaaaaauguccuauuuuuc

SEQ ID NO: 2006 - RNA, 19 nt, Artificial Sequence
  Description of Artificial Sequence: Synthetic oligonucleotide
auaaaaauguccuauuuuu

SEQ ID NO: 2007 - RNA, 19 nt, Artificial Sequence
  Description of Artificial Sequence: Synthetic oligonucleotide
aauaaaaauguccuauuuu

SEQ ID NO: 2008 - RNA, 19 nt, Artificial Sequence
  Description of Artificial Sequence: Synthetic oligonucleotide
uaauaaaaauguccuauuu

SEQ ID NO: 2009 - RNA, 19 nt, Artificial Sequence
  Description of Artificial Sequence: Synthetic oligonucleotide
uuaauaaaaauguccuauu

SEQ ID NO: 2010 - RNA, 19 nt, Artificial Sequence
  Description of Artificial Sequence: Synthetic oligonucleotide
uuuaauaaaaauguccuau

SEQ ID NO: 2011 - RNA, 19 nt, Artificial Sequence
  Description of Artificial Sequence: Synthetic oligonucleotide
uuuuaauaaaaauguccua

SEQ ID NO: 2012 - RNA, 19 nt, Artificial Sequence
  Description of Artificial Sequence: Synthetic oligonucleotide
auuuuaauaaaaauguccu

SEQ ID NO: 2013 - RNA, 19 nt, Artificial Sequence
  Description of Artificial Sequence: Synthetic oligonucleotide
uauuuuaauaaaaaugucc

SEQ ID NO: 2014 - RNA, 19 nt, Artificial Sequence
  Description of Artificial Sequence: Synthetic oligonucleotide
uuauuuuaauaaaaauguc

SEQ ID NO: 2015 - RNA, 19 nt, Artificial Sequence
  Description of Artificial Sequence: Synthetic oligonucleotide
uuuauuuuaauaaaaaugu

SEQ ID NO: 2016 - RNA, 19 nt, Artificial Sequence
  Description of Artificial Sequence: Synthetic oligonucleotide
cuuuauuuuaauaaaaaug

SEQ ID NO: 2017 - RNA, 19 nt, Artificial Sequence
  Description of Artificial Sequence: Synthetic oligonucleotide
acuuuauuuuaauaaaaau

SEQ ID NO: 2018 - RNA, 19 nt, Artificial Sequence
  Description of Artificial Sequence: Synthetic oligonucleotide
aacuuuauuuuaauaaaaa

SEQ ID NO: 2019 - RNA, 19 nt, Artificial Sequence
  Description of Artificial Sequence: Synthetic oligonucleotide
gaacuuuauuuuaauaaaa

SEQ ID NO: 2020 - RNA, 19 nt, Artificial Sequence
  Description of Artificial Sequence: Synthetic oligonucleotide
agaacuuuauuuuaauaaa

SEQ ID NO: 2021 - RNA, 19 nt, Artificial Sequence
  Description of Artificial Sequence: Synthetic oligonucleotide
gagaacuuuauuuuaauaa

SEQ ID NO: 2022 - RNA, 19 nt, Artificial Sequence
  Description of Artificial Sequence: Synthetic oligonucleotide
agagaacuuuauuuuaaua

SEQ ID NO: 2023 - RNA, 19 nt, Artificial Sequence
  Description of Artificial Sequence: Synthetic oligonucleotide
aagagaacuuuauuuuaau

SEQ ID NO: 2024 - RNA, 19 nt, Artificial Sequence
  Description of Artificial Sequence: Synthetic oligonucleotide
uaagagaacuuuauuuuaa

SEQ ID NO: 2025 - RNA, 19 nt, Artificial Sequence
  Description of Artificial Sequence: Synthetic oligonucleotide
cuaagagaacuuuauuuua

SEQ ID NO: 2026 - RNA, 19 nt, Artificial Sequence
  Description of Artificial Sequence: Synthetic oligonucleotide
gcuaagagaacuuuauuuu

SEQ ID NO: 2027 - RNA, 19 nt, Artificial Sequence
  Description of Artificial Sequence: Synthetic oligonucleotide
cgcuaagagaacuuuauuu

SEQ ID NO: 2028 - RNA, 19 nt, Artificial Sequence
  Description of Artificial Sequence: Synthetic oligonucleotide
acgcuaagagaacuuuauu

SEQ ID NO: 2029 - RNA, 19 nt, Artificial Sequence
  Description of Artificial Sequence: Synthetic oligonucleotide
aacgcuaagagaacuuuau

SEQ ID NO: 2030 - RNA, 19 nt, Artificial Sequence
  Description of Artificial Sequence: Synthetic oligonucleotide
aaacgcuaagagaacuuua

SEQ ID NO: 2031 - RNA, 19 nt, Artificial Sequence
  Description of Artificial Sequence: Synthetic oligonucleotide
caaacgcuaagagaacuuu

SEQ ID NO: 2032 - RNA, 19 nt, Artificial Sequence
  Description of Artificial Sequence: Synthetic oligonucleotide
acaaacgcuaagagaacuu

SEQ ID NO: 2033 - RNA, 19 nt, Artificial Sequence
  Description of Artificial Sequence: Synthetic oligonucleotide
cacaaacgcuaagagaacu

SEQ ID NO: 2034 - RNA, 19 nt, Artificial Sequence
  Description of Artificial Sequence: Synthetic oligonucleotide
ccacaaacgcuaagagaac

SEQ ID NO: 2035 - RNA, 19 nt, Artificial Sequence
  Description of Artificial Sequence: Synthetic oligonucleotide
uccacaaacgcuaagagaa

SEQ ID NO: 2036 - RNA, 19 nt, Artificial Sequence
  Description of Artificial Sequence: Synthetic oligonucleotide
uuccacaaacgcuaagaga

SEQ ID NO: 2037 - RNA, 19 nt, Artificial Sequence
  Description of Artificial Sequence: Synthetic oligonucleotide
auuccacaaacgcuaagag

SEQ ID NO: 2038 - RNA, 19 nt, Artificial Sequence
  Description of Artificial Sequence: Synthetic oligonucleotide
gauuccacaaacgcuaaga

SEQ ID NO: 2039 - RNA, 19 nt, Artificial Sequence
  Description of Artificial Sequence: Synthetic oligonucleotide
agauuccacaaacgcuaag

SEQ ID NO: 2040 - RNA, 19 nt, Artificial Sequence
  Description of Artificial Sequence: Synthetic oligonucleotide
cagauuccacaaacgcuaa

SEQ ID NO: 2041 - RNA, 19 nt, Artificial Sequence
  Description of Artificial Sequence: Synthetic oligonucleotide
gcagauuccacaaacgcua

SEQ ID NO: 2042 - RNA, 19 nt, Artificial Sequence
  Description of Artificial Sequence: Synthetic oligonucleotide
ggcagauuccacaaacgcu

SEQ ID NO: 2043 - RNA, 19 nt, Artificial Sequence
  Description of Artificial Sequence: Synthetic oligonucleotide
cggcagauuccacaaacgc

SEQ ID NO: 2044 - RNA, 19 nt, Artificial Sequence
  Description of Artificial Sequence: Synthetic oligonucleotide
ucggcagauuccacaaacg

SEQ ID NO: 2045 - RNA, 19 nt, Artificial Sequence
  Description of Artificial Sequence: Synthetic oligonucleotide
cucggcagauuccacaaac

SEQ ID NO: 2046 - RNA, 19 nt, Artificial Sequence
  Description of Artificial Sequence: Synthetic oligonucleotide
gcucggcagauuccacaaa

SEQ ID NO: 2047 - RNA, 19 nt, Artificial Sequence
  Description of Artificial Sequence: Synthetic oligonucleotide
ggcucggcagauuccacaa

SEQ ID NO: 2048 - RNA, 19 nt, Artificial Sequence
  Description of Artificial Sequence: Synthetic oligonucleotide
uggcucggcagauuccaca

SEQ ID NO: 2049 - RNA, 19 nt, Artificial Sequence
  Description of Artificial Sequence: Synthetic oligonucleotide
auggcucggcagauuccac

SEQ ID NO: 2050 - RNA, 19 nt, Artificial Sequence
  Description of Artificial Sequence: Synthetic oligonucleotide
aauggcucggcagauucca

SEQ ID NO: 2051 - RNA, 19 nt, Artificial Sequence
  Description of Artificial Sequence: Synthetic oligonucleotide
aaauggcucggcagauucc

SEQ ID NO: 2052 - RNA, 19 nt, Artificial Sequence
  Description of Artificial Sequence: Synthetic oligonucleotide
aaaauggcucggcagauuc

SEQ ID NO: 2053 - RNA, 19 nt, Artificial Sequence
  Description of Artificial Sequence: Synthetic oligonucleotide
caaaauggcucggcagauu

SEQ ID NO: 2054 - RNA, 19 nt, Artificial Sequence
  Description of Artificial Sequence: Synthetic oligonucleotide
acaaaauggcucggcagau

SEQ ID NO: 2055 - RNA, 19 nt, Artificial Sequence
  Description of Artificial Sequence: Synthetic oligonucleotide
cacaaaauggcucggcaga

SEQ ID NO: 2056 - RNA, 19 nt, Artificial Sequence
  Description of Artificial Sequence: Synthetic oligonucleotide
ccacaaaauggcucggcag

SEQ ID NO: 2057 - RNA, 19 nt, Artificial Sequence
  Description of Artificial Sequence: Synthetic oligonucleotide
uccacaaaauggcucggca

SEQ ID NO: 2058 - RNA, 19 nt, Artificial Sequence
  Description of Artificial Sequence: Synthetic oligonucleotide
uuccacaaaauggcucggc

SEQ ID NO: 2059 - RNA, 19 nt, Artificial Sequence
  Description of Artificial Sequence: Synthetic oligonucleotide
uuuccacaaaauggcucgg

SEQ ID NO: 2060 - RNA, 19 nt, Artificial Sequence
  Description of Artificial Sequence: Synthetic oligonucleotide
auuuccacaaaauggcucg

SEQ ID NO: 2061 - RNA, 19 nt, Artificial Sequence
  Description of Artificial Sequence: Synthetic oligonucleotide
aauuuccacaaaauggcuc

SEQ ID NO: 2062 - RNA, 19 nt, Artificial Sequence
  Description of Artificial Sequence: Synthetic oligonucleotide
caauuuccacaaaauggcu

SEQ ID NO: 2063 - RNA, 19 nt, Artificial Sequence
  Description of Artificial Sequence: Synthetic oligonucleotide
ccaauuuccacaaaauggc

SEQ ID NO: 2064 - RNA, 19 nt, Artificial Sequence
  Description of Artificial Sequence: Synthetic oligonucleotide
cccaauuuccacaaaaugg

SEQ ID NO: 2065 - RNA, 19 nt, Artificial Sequence
  Description of Artificial Sequence: Synthetic oligonucleotide
ucccaauuuccacaaaaug

SEQ ID NO: 2066 - RNA, 19 nt, Artificial Sequence
  Description of Artificial Sequence: Synthetic oligonucleotide
aucccaauuuccacaaaau

SEQ ID NO: 2067 - RNA, 19 nt, Artificial Sequence
  Description of Artificial Sequence: Synthetic oligonucleotide
gaucccaauuuccacaaaa

SEQ ID NO: 2068 - RNA, 19 nt, Artificial Sequence
  Description of Artificial Sequence: Synthetic oligonucleotide
ggaucccaauuuccacaaa

SEQ ID NO: 2069 - RNA, 19 nt, Artificial Sequence
  Description of Artificial Sequence: Synthetic oligonucleotide
uggaucccaauuuccacaa

SEQ ID NO: 2070 - RNA, 19 nt, Artificial Sequence
  Description of Artificial Sequence: Synthetic oligonucleotide
auggaucccaauuuccaca

SEQ ID NO: 2071 - RNA, 19 nt, Artificial Sequence
  Description of Artificial Sequence: Synthetic oligonucleotide
uauggaucccaauuuccac

SEQ ID NO: 2072 - RNA, 19 nt, Artificial Sequence
  Description of Artificial Sequence: Synthetic oligonucleotide
auauggaucccaauuucca

SEQ ID NO: 2073 - RNA, 19 nt, Artificial Sequence
  Description of Artificial Sequence: Synthetic oligonucleotide
gauauggaucccaauuucc

SEQ ID NO: 2074 - RNA, 19 nt, Artificial Sequence
  Description of Artificial Sequence: Synthetic oligonucleotide
agauauggaucccaauuuc

SEQ ID NO: 2075 - RNA, 19 nt, Artificial Sequence
  Description of Artificial Sequence: Synthetic oligonucleotide
cagauauggaucccaauuu

SEQ ID NO: 2076 - RNA, 19 nt, Artificial Sequence
  Description of Artificial Sequence: Synthetic oligonucleotide
ccagauauggaucccaauu

SEQ ID NO: 2077 - RNA, 19 nt, Artificial Sequence
  Description of Artificial Sequence: Synthetic oligonucleotide
uccagauauggaucccaau

SEQ ID NO: 2078 - RNA, 19 nt, Artificial Sequence
  Description of Artificial Sequence: Synthetic oligonucleotide
cuccagauauggaucccaa

SEQ ID NO: 2079 - RNA, 19 nt, Artificial Sequence
  Description of Artificial Sequence: Synthetic oligonucleotide
ucuccagauauggauccca

SEQ ID NO: 2080 - RNA, 19 nt, Artificial Sequence
  Description of Artificial Sequence: Synthetic oligonucleotide
gucuccagauauggauccc

SEQ ID NO: 2081 - RNA, 19 nt, Artificial Sequence
  Description of Artificial Sequence: Synthetic oligonucleotide
ugucuccagauauggaucc

SEQ ID NO: 2082 - RNA, 19 nt, Artificial Sequence
  Description of Artificial Sequence: Synthetic oligonucleotide
gugucuccagauauggauc

SEQ ID NO: 2083 - RNA, 19 nt, Artificial Sequence
  Description of Artificial Sequence: Synthetic oligonucleotide
agugucuccagauauggau

SEQ ID NO: 2084 - RNA, 19 nt, Artificial Sequence
  Description of Artificial Sequence: Synthetic oligonucleotide
aagugucuccagauaugga

SEQ ID NO: 2085 - RNA, 19 nt, Artificial Sequence
  Description of Artificial Sequence: Synthetic oligonucleotide
gaagugucuccagauaugg

SEQ ID NO: 2086 - RNA, 19 nt, Artificial Sequence
  Description of Artificial Sequence: Synthetic oligonucleotide
ggaagugucuccagauaug

SEQ ID NO: 2087 - RNA, 19 nt, Artificial Sequence
  Description of Artificial Sequence: Synthetic oligonucleotide
gggaagugucuccagauau

SEQ ID NO: 2088 - RNA, 19 nt, Artificial Sequence
  Description of Artificial Sequence: Synthetic oligonucleotide
ugggaagugucuccagaua

SEQ ID NO: 2089 - RNA, 19 nt, Artificial Sequence
  Description of Artificial Sequence: Synthetic oligonucleotide
uugggaagugucuccagau

SEQ ID NO: 2090 - RNA, 19 nt, Artificial Sequence
  Description of Artificial Sequence: Synthetic oligonucleotide
cuugggaagugucuccaga

SEQ ID NO: 2091 - RNA, 19 nt, Artificial Sequence
  Description of Artificial Sequence: Synthetic oligonucleotide
ccuugggaagugucuccag

SEQ ID NO: 2092 - RNA, 19 nt, Artificial Sequence
  Description of Artificial Sequence: Synthetic oligonucleotide
gccuugggaagugucucca

SEQ ID NO: 2093 - RNA, 19 nt, Artificial Sequence
  Description of Artificial Sequence: Synthetic oligonucleotide
ggccuugggaagugucucc

SEQ ID NO: 2094 - RNA, 19 nt, Artificial Sequence
  Description of Artificial Sequence: Synthetic oligonucleotide
aggccuugggaagugucuc

SEQ ID NO: 2095 - RNA, 19 nt, Artificial Sequence
  Description of Artificial Sequence: Synthetic oligonucleotide
caggccuugggaagugucu

SEQ ID NO: 2096 - RNA, 19 nt, Artificial Sequence
  Description of Artificial Sequence: Synthetic oligonucleotide
gcaggccuugggaaguguc

SEQ ID NO: 2097 - RNA, 19 nt, Artificial Sequence
  Description of Artificial Sequence: Synthetic oligonucleotide
ggcaggccuugggaagugu

SEQ ID NO: 2098 - RNA, 19 nt, Artificial Sequence
  Description of Artificial Sequence: Synthetic oligonucleotide
aggcaggccuugggaagug

SEQ ID NO: 2099 - RNA, 19 nt, Artificial Sequence
  Description of Artificial Sequence: Synthetic oligonucleotide
gaggcaggccuugggaagu

SEQ ID NO: 2100 - RNA, 19 nt, Artificial Sequence
  Description of Artificial Sequence: Synthetic oligonucleotide
ugaggcaggccuugggaag

SEQ ID NO: 2101 - RNA, 19 nt, Artificial Sequence
  Description of Artificial Sequence: Synthetic oligonucleotide
gugaggcaggccuugggaa

SEQ ID NO: 2102 - RNA, 19 nt, Artificial Sequence
  Description of Artificial Sequence: Synthetic oligonucleotide
ggugaggcaggccuuggga

SEQ ID NO: 2103 - RNA, 19 nt, Artificial Sequence
  Description of Artificial Sequence: Synthetic oligonucleotide
aggugaggcaggccuuggg

SEQ ID NO: 2104 - RNA, 19 nt, Artificial Sequence
  Description of Artificial Sequence: Synthetic oligonucleotide
gaggugaggcaggccuugg

SEQ ID NO: 2105 - RNA, 19 nt, Artificial Sequence
  Description of Artificial Sequence: Synthetic oligonucleotide
ggaggugaggcaggccuug

SEQ ID NO: 2106 - RNA, 19 nt, Artificial Sequence
  Description of Artificial Sequence: Synthetic oligonucleotide
uggaggugaggcaggccuu

SEQ ID NO: 2107 - RNA, 19 nt, Artificial Sequence
  Description of Artificial Sequence: Synthetic oligonucleotide
guggaggugaggcaggccu

SEQ ID NO: 2108 - RNA, 19 nt, Artificial Sequence
  Description of Artificial Sequence: Synthetic oligonucleotide
gguggaggugaggcaggcc

SEQ ID NO: 2109 - RNA, 19 nt, Artificial Sequence
  Description of Artificial Sequence: Synthetic oligonucleotide
ggguggaggugaggcaggc

SEQ ID NO: 2110 - RNA, 19 nt, Artificial Sequence
  Description of Artificial Sequence: Synthetic oligonucleotide
gggguggaggugaggcagg

SEQ ID NO: 2111 - RNA, 19 nt, Artificial Sequence
  Description of Artificial Sequence: Synthetic oligonucleotide
ggggguggaggugaggcag

SEQ ID NO: 2112 - RNA, 19 nt, Artificial Sequence
  Description of Artificial Sequence: Synthetic oligonucleotide
aggggguggaggugaggca

SEQ ID NO: 2113 - RNA, 19 nt, Artificial Sequence
  Description of Artificial Sequence: Synthetic oligonucleotide
caggggguggaggugaggc

SEQ ID NO: 2114 - RNA, 19 nt, Artificial Sequence
  Description of Artificial Sequence: Synthetic oligonucleotide
gcaggggguggaggugagg

SEQ ID NO: 2115 - RNA, 19 nt, Artificial Sequence
  Description of Artificial Sequence: Synthetic oligonucleotide
ggcaggggguggaggugag

SEQ ID NO: 2116 - RNA, 19 nt, Artificial Sequence
  Description of Artificial Sequence: Synthetic oligonucleotide
gggcaggggguggagguga

SEQ ID NO: 2117 - RNA, 19 nt, Artificial Sequence
  Description of Artificial Sequence: Synthetic oligonucleotide
ugggcaggggguggaggug

SEQ ID NO: 2118 - RNA, 19 nt, Artificial Sequence
  Description of Artificial Sequence: Synthetic oligonucleotide
gugggcaggggguggaggu

SEQ ID NO: 2119 - RNA, 19 nt, Artificial Sequence
  Description of Artificial Sequence: Synthetic oligonucleotide
ggugggcaggggguggagg

SEQ ID NO: 2120 - RNA, 19 nt, Artificial Sequence
  Description of Artificial Sequence: Synthetic oligonucleotide
aggugggcaggggguggag

SEQ ID NO: 2121 - RNA, 19 nt, Artificial Sequence
  Description of Artificial Sequence: Synthetic oligonucleotide
aaggugggcagggggugga

SEQ ID NO: 2122 - RNA, 19 nt, Artificial Sequence
  Description of Artificial Sequence: Synthetic oligonucleotide
caaggugggcagggggugg

SEQ ID NO: 2123 - RNA, 19 nt, Artificial Sequence
  Description of Artificial Sequence: Synthetic oligonucleotide
ucaaggugggcagggggug

SEQ ID NO: 2124 - RNA, 19 nt, Artificial Sequence
  Description of Artificial Sequence: Synthetic oligonucleotide
aucaaggugggcagggggu

SEQ ID NO: 2125 - RNA, 19 nt, Artificial Sequence
  Description of Artificial Sequence: Synthetic oligonucleotide
gaucaaggugggcaggggg

SEQ ID NO: 2126 - RNA, 19 nt, Artificial Sequence
  Description of Artificial Sequence: Synthetic oligonucleotide
ggaucaaggugggcagggg

SEQ ID NO: 2127 - RNA, 19 nt, Artificial Sequence
  Description of Artificial Sequence: Synthetic oligonucleotide
uggaucaaggugggcaggg

SEQ ID NO: 2128 - RNA, 19 nt, Artificial Sequence
  Description of Artificial Sequence: Synthetic oligonucleotide
auggaucaaggugggcagg

SEQ ID NO: 2129 - RNA, 19 nt, Artificial Sequence
  Description of Artificial Sequence: Synthetic oligonucleotide
cauggaucaaggugggcag

SEQ ID NO: 2130 - RNA, 19 nt, Artificial Sequence
  Description of Artificial Sequence: Synthetic oligonucleotide
gcauggaucaaggugggca

SEQ ID NO: 2131 - RNA, 19 nt, Artificial Sequence
  Description of Artificial Sequence: Synthetic oligonucleotide
agcauggaucaaggugggc

SEQ ID NO: 2132 - RNA, 19 nt, Artificial Sequence
  Description of Artificial Sequence: Synthetic oligonucleotide
gagcauggaucaagguggg

SEQ ID NO: 2133 - RNA, 19 nt, Artificial Sequence
  Description of Artificial Sequence: Synthetic oligonucleotide
ggagcauggaucaaggugg

SEQ ID NO: 2134 - RNA, 19 nt, Artificial Sequence
  Description of Artificial Sequence: Synthetic oligonucleotide
aggagcauggaucaaggug

SEQ ID NO: 2135 - RNA, 19 nt, Artificial Sequence
  Description of Artificial Sequence: Synthetic oligonucleotide
aaggagcauggaucaaggu

SEQ ID NO: 2136 - RNA, 19 nt, Artificial Sequence
  Description of Artificial Sequence: Synthetic oligonucleotide
aaaggagcauggaucaagg

SEQ ID NO: 2137 - RNA, 19 nt, Artificial Sequence
  Description of Artificial Sequence: Synthetic oligonucleotide
caaaggagcauggaucaag

SEQ ID NO: 2138 - RNA, 19 nt, Artificial Sequence
  Description of Artificial Sequence: Synthetic oligonucleotide
ucaaaggagcauggaucaa

SEQ ID NO: 2139 - RNA, 19 nt, Artificial Sequence
  Description of Artificial Sequence: Synthetic oligonucleotide
gucaaaggagcauggauca

SEQ ID NO: 2140 - RNA, 19 nt, Artificial Sequence
  Description of Artificial Sequence: Synthetic oligonucleotide
ggucaaaggagcauggauc

SEQ ID NO: 2141 - RNA, 19 nt, Artificial Sequence
  Description of Artificial Sequence: Synthetic oligonucleotide
aggucaaaggagcauggau

SEQ ID NO: 2142 - RNA, 19 nt, Artificial Sequence
  Description of Artificial Sequence: Synthetic oligonucleotide
gaggucaaaggagcaugga

SEQ ID NO: 2143 - RNA, 19 nt, Artificial Sequence
  Description of Artificial Sequence: Synthetic oligonucleotide
ggaggucaaaggagcaugg

SEQ ID NO: 2144 - RNA, 19 nt, Artificial Sequence
  Description of Artificial Sequence: Synthetic oligonucleotide
aggaggucaaaggagcaug

SEQ ID NO: 2145 - RNA, 19 nt, Artificial Sequence
  Description of Artificial Sequence: Synthetic oligonucleotide
gaggaggucaaaggagcau

SEQ ID NO: 2146 - RNA, 19 nt, Artificial Sequence
  Description of Artificial Sequence: Synthetic oligonucleotide
cgaggaggucaaaggagca

SEQ ID NO: 2147 - RNA, 19 nt, Artificial Sequence
  Description of Artificial Sequence: Synthetic oligonucleotide
acgaggaggucaaaggagc

SEQ ID NO: 2148 - RNA, 19 nt, Artificial Sequence
  Description of Artificial Sequence: Synthetic oligonucleotide
cacgaggaggucaaaggag

SEQ ID NO: 2149 - RNA, 19 nt, Artificial Sequence
  Description of Artificial Sequence: Synthetic oligonucleotide
acacgaggaggucaaagga

SEQ ID NO: 2150 - RNA, 19 nt, Artificial Sequence
  Description of Artificial Sequence: Synthetic oligonucleotide
cacacgaggaggucaaagg

SEQ ID NO: 2151 - RNA, 19 nt, Artificial Sequence
  Description of Artificial Sequence: Synthetic oligonucleotide
ucacacgaggaggucaaag

SEQ ID NO: 2152 - RNA, 19 nt, Artificial Sequence
  Description of Artificial Sequence: Synthetic oligonucleotide
cucacacgaggaggucaaa

SEQ ID NO: 2153 - RNA, 19 nt, Artificial Sequence
  Description of Artificial Sequence: Synthetic oligonucleotide
ucucacacgaggaggucaa

SEQ ID NO: 2154 - RNA, 19 nt, Artificial Sequence
  Description of Artificial Sequence: Synthetic oligonucleotide
uucucacacgaggagguca

SEQ ID NO: 2155 - RNA, 19 nt, Artificial Sequence
  Description of Artificial Sequence: Synthetic oligonucleotide
guucucacacgaggagguc

SEQ ID NO: 2156 - RNA, 19 nt, Artificial Sequence
  Description of Artificial Sequence: Synthetic oligonucleotide
gguucucacacgaggaggu

SEQ ID NO: 2157 - RNA, 19 nt, Artificial Sequence
  Description of Artificial Sequence: Synthetic oligonucleotide
ggguucucacacgaggagg

SEQ ID NO: 2158 - RNA, 19 nt, Artificial Sequence
  Description of Artificial Sequence: Synthetic oligonucleotide
gggguucucacacgaggag

SEQ ID NO: 2159 - RNA, 19 nt, Artificial Sequence
  Description of Artificial Sequence: Synthetic oligonucleotide
agggguucucacacgagga

SEQ ID NO: 2160 - RNA, 19 nt, Artificial Sequence
  Description of Artificial Sequence: Synthetic oligonucleotide
aagggguucucacacgagg

SEQ ID NO: 2161 - RNA, 19 nt, Artificial Sequence
  Description of Artificial Sequence: Synthetic oligonucleotide
aaagggguucucacacgag

SEQ ID NO: 2162 - RNA, 19 nt, Artificial Sequence
  Description of Artificial Sequence: Synthetic oligonucleotide
caaagggguucucacacga

SEQ ID NO: 2163 - RNA, 19 nt, Artificial Sequence
  Description of Artificial Sequence: Synthetic oligonucleotide
gcaaagggguucucacacg

SEQ ID NO: 2164 - RNA, 19 nt, Artificial Sequence
  Description of Artificial Sequence: Synthetic oligonucleotide
ggcaaagggguucucacac

SEQ ID NO: 2165 - RNA, 19 nt, Artificial Sequence
  Description of Artificial Sequence: Synthetic oligonucleotide
uggcaaagggguucucaca

SEQ ID NO: 2166 - RNA, 19 nt, Artificial Sequence
  Description of Artificial Sequence: Synthetic oligonucleotide
cuggcaaagggguucucac

SEQ ID NO: 2167 - RNA, 19 nt, Artificial Sequence
  Description of Artificial Sequence: Synthetic oligonucleotide
ucuggcaaagggguucuca

SEQ ID NO: 2168 - RNA, 19 nt, Artificial Sequence
  Description of Artificial Sequence: Synthetic oligonucleotide
cucuggcaaagggguucuc

SEQ ID NO: 2169 - RNA, 19 nt, Artificial Sequence
  Description of Artificial Sequence: Synthetic oligonucleotide
acucuggcaaagggguucu

SEQ ID NO: 2170 - RNA, 19 nt, Artificial Sequence
  Description of Artificial Sequence: Synthetic oligonucleotide
cacucuggcaaagggguuc

SEQ ID NO: 2171 - RNA, 19 nt, Artificial Sequence
  Description of Artificial Sequence: Synthetic oligonucleotide
ucacucuggcaaagggguu

SEQ ID NO: 2172 - RNA, 19 nt, Artificial Sequence
  Description of Artificial Sequence: Synthetic oligonucleotide
cucacucuggcaaaggggu

SEQ ID NO: 2173 - RNA, 19 nt, Artificial Sequence
  Description of Artificial Sequence: Synthetic oligonucleotide
ucucacucuggcaaagggg

SEQ ID NO: 2174 - RNA, 19 nt, Artificial Sequence
  Description of Artificial Sequence: Synthetic oligonucleotide
gucucacucuggcaaaggg

SEQ ID NO: 2175 - RNA, 19 nt, Artificial Sequence
  Description of Artificial Sequence: Synthetic oligonucleotide
cgucucacucuggcaaagg

SEQ ID NO: 2176 - RNA, 19 nt, Artificial Sequence
  Description of Artificial Sequence: Synthetic oligonucleotide
acgucucacucuggcaaag

SEQ ID NO: 2177 - RNA, 19 nt, Artificial Sequence
  Description of Artificial Sequence: Synthetic oligonucleotide
cacgucucacucuggcaaa

SEQ ID NO: 2178 - RNA, 19 nt, Artificial Sequence
  Description of Artificial Sequence: Synthetic oligonucleotide
acacgucucacucuggcaa

SEQ ID NO: 2179 - RNA, 19 nt, Artificial Sequence
  Description of Artificial Sequence: Synthetic oligonucleotide
cacacgucucacucuggca

SEQ ID NO: 2180 - RNA, 19 nt, Artificial Sequence
  Description of Artificial Sequence: Synthetic oligonucleotide
gcacacgucucacucuggc

SEQ ID NO: 2181 - RNA, 19 nt, Artificial Sequence
  Description of Artificial Sequence: Synthetic oligonucleotide
ugcacacgucucacucugg

SEQ ID NO: 2182 - RNA, 19 nt, Artificial Sequence
  Description of Artificial Sequence: Synthetic oligonucleotide
cugcacacgucucacucug

SEQ ID NO: 2183 - RNA, 19 nt, Artificial Sequence
  Description of Artificial Sequence: Synthetic oligonucleotide
ucugcacacgucucacucu

SEQ ID NO: 2184 - RNA, 19 nt, Artificial Sequence
  Description of Artificial Sequence: Synthetic oligonucleotide
uucugcacacgucucacuc

SEQ ID NO: 2185 - RNA, 19 nt, Artificial Sequence
  Description of Artificial Sequence: Synthetic oligonucleotide
auucugcacacgucucacu

SEQ ID NO: 2186 - RNA, 19 nt, Artificial Sequence
  Description of Artificial Sequence: Synthetic oligonucleotide
cauucugcacacgucucac

SEQ ID NO: 2187 - RNA, 19 nt, Artificial Sequence
  Description of Artificial Sequence: Synthetic oligonucleotide
ucauucugcacacgucuca

SEQ ID NO: 2188 - RNA, 19 nt, Artificial Sequence
  Description of Artificial Sequence: Synthetic oligonucleotide
uucauucugcacacgucuc

SEQ ID NO: 2189 - RNA, 19 nt, Artificial Sequence
  Description of Artificial Sequence: Synthetic oligonucleotide
guucauucugcacacgucu

SEQ ID NO: 2190 - RNA, 19 nt, Artificial Sequence
  Description of Artificial Sequence: Synthetic oligonucleotide
aguucauucugcacacguc

SEQ ID NO: 2191 - RNA, 19 nt, Artificial Sequence
  Description of Artificial Sequence: Synthetic oligonucleotide
uaguucauucugcacacgu

SEQ ID NO: 2192 - RNA, 19 nt, Artificial Sequence
  Description of Artificial Sequence: Synthetic oligonucleotide
uuaguucauucugcacacg

SEQ ID NO: 2193 - RNA, 19 nt, Artificial Sequence
  Description of Artificial Sequence: Synthetic oligonucleotide
cuuaguucauucugcacac

SEQ ID NO: 2194 - RNA, 19 nt, Artificial Sequence
  Description of Artificial Sequence: Synthetic oligonucleotide
gcuuaguucauucugcaca

SEQ ID NO: 2195 - RNA, 19 nt, Artificial Sequence
  Description of Artificial Sequence: Synthetic oligonucleotide
ggcuuaguucauucugcac

SEQ ID NO: 2196 - RNA, 19 nt, Artificial Sequence
  Description of Artificial Sequence: Synthetic oligonucleotide
gggcuuaguucauucugca

SEQ ID NO: 2197 - RNA, 19 nt, Artificial Sequence
  Description of Artificial Sequence: Synthetic oligonucleotide
ggggcuuaguucauucugc

SEQ ID NO: 2198 - RNA, 19 nt, Artificial Sequence
  Description of Artificial Sequence: Synthetic oligonucleotide
uggggcuuaguucauucug

SEQ ID NO: 2199 - RNA, 19 nt, Artificial Sequence
  Description of Artificial Sequence: Synthetic oligonucleotide
cuggggcuuaguucauucu

SEQ ID NO: 2200 - RNA, 19 nt, Artificial Sequence
  Description of Artificial Sequence: Synthetic oligonucleotide
ucuggggcuuaguucauuc

SEQ ID NO: 2201 - RNA, 19 nt, Artificial Sequence
  Description of Artificial Sequence: Synthetic oligonucleotide
cucuggggcuuaguucauu

SEQ ID NO: 2202 - RNA, 19 nt, Artificial Sequence
  Description of Artificial Sequence: Synthetic oligonucleotide
ccucuggggcuuaguucau

SEQ ID NO: 2203 - RNA, 19 nt, Artificial Sequence
  Description of Artificial Sequence: Synthetic oligonucleotide
cccucuggggcuuaguuca

SEQ ID NO: 2204 - RNA, 19 nt, Artificial Sequence
  Description of Artificial Sequence: Synthetic oligonucleotide
acccucuggggcuuaguuc

SEQ ID NO: 2205 - RNA, 19 nt, Artificial Sequence
  Description of Artificial Sequence: Synthetic oligonucleotide
aacccucuggggcuuaguu

SEQ ID NO: 2206 - RNA, 19 nt, Artificial Sequence
  Description of Artificial Sequence: Synthetic oligonucleotide
aaacccucuggggcuuagu

SEQ ID NO: 2207 - RNA, 19 nt, Artificial Sequence
  Description of Artificial Sequence: Synthetic oligonucleotide
aaaacccucuggggcuuag

SEQ ID NO: 2208 - RNA, 19 nt, Artificial Sequence
  Description of Artificial Sequence: Synthetic oligonucleotide
uaaaacccucuggggcuua

SEQ ID NO: 2209 - RNA, 19 nt, Artificial Sequence
  Description of Artificial Sequence: Synthetic oligonucleotide
uuaaaacccucuggggcuu

SEQ ID NO: 2210 - RNA, 19 nt, Artificial Sequence
  Description of Artificial Sequence: Synthetic oligonucleotide
auuaaaacccucuggggcu

SEQ ID NO: 2211 - RNA, 19 nt, Artificial Sequence
  Description of Artificial Sequence: Synthetic oligonucleotide
cauuaaaacccucuggggc

SEQ ID NO: 2212 - RNA, 19 nt, Artificial Sequence
  Description of Artificial Sequence: Synthetic oligonucleotide
ccauuaaaacccucugggg

SEQ ID NO: 2213 - RNA, 19 nt, Artificial Sequence
  Description of Artificial Sequence: Synthetic oligonucleotide
gccauuaaaacccucuggg

SEQ ID NO: 2214 - RNA, 19 nt, Artificial Sequence
  Description of Artificial Sequence: Synthetic oligonucleotide
agccauuaaaacccucugg

SEQ ID NO: 2215 - RNA, 19 nt, Artificial Sequence
  Description of Artificial Sequence: Synthetic oligonucleotide
aagccauuaaaacccucug

SEQ ID NO: 2216 - RNA, 19 nt, Artificial Sequence
  Description of Artificial Sequence: Synthetic oligonucleotide
caagccauuaaaacccucu

SEQ ID NO: 2217 - RNA, 19 nt, Artificial Sequence
  Description of Artificial Sequence: Synthetic oligonucleotide
gcaagccauuaaaacccuc

SEQ ID NO: 2218 - RNA, 19 nt, Artificial Sequence
  Description of Artificial Sequence: Synthetic oligonucleotide
ggcaagccauuaaaacccu

SEQ ID NO: 2219 - RNA, 19 nt, Artificial Sequence
  Description of Artificial Sequence: Synthetic oligonucleotide
aggcaagccauuaaaaccc

SEQ ID NO: 2220 - RNA, 19 nt, Artificial Sequence
  Description of Artificial Sequence: Synthetic oligonucleotide
caggcaagccauuaaaacc

SEQ ID NO: 2221 - RNA, 19 nt, Artificial Sequence
  Description of Artificial Sequence: Synthetic oligonucleotide
gcaggcaagccauuaaaac

SEQ ID NO: 2222 - RNA, 19 nt, Artificial Sequence
  Description of Artificial Sequence: Synthetic oligonucleotide
agcaggcaagccauuaaaa

SEQ ID NO: 2223 - RNA, 19 nt, Artificial Sequence
  Description of Artificial Sequence: Synthetic oligonucleotide
cagcaggcaagccauuaaa

SEQ ID NO: 2224 - RNA, 19 nt, Artificial Sequence
  Description of Artificial Sequence: Synthetic oligonucleotide
acagcaggcaagccauuaa

SEQ ID NO: 2225 - RNA, 19 nt, Artificial Sequence
  Description of Artificial Sequence: Synthetic oligonucleotide
aacagcaggcaagccauua

SEQ ID NO: 2226 - RNA, 19 nt, Artificial Sequence
  Description of Artificial Sequence: Synthetic oligonucleotide
aaacagcaggcaagccauu

SEQ ID NO: 2227 - RNA, 19 nt, Artificial Sequence
  Description of Artificial Sequence: Synthetic oligonucleotide
gaaacagcaggcaagccau

SEQ ID NO: 2228 - RNA, 19 nt, Artificial Sequence
  Description of Artificial Sequence: Synthetic oligonucleotide
ggaaacagcaggcaagcca

SEQ ID NO: 2229 - RNA, 19 nt, Artificial Sequence
  Description of Artificial Sequence: Synthetic oligonucleotide
gggaaacagcaggcaagcc

SEQ ID NO: 2230 - RNA, 19 nt, Artificial Sequence
  Description of Artificial Sequence: Synthetic oligonucleotide
ugggaaacagcaggcaagc

SEQ ID NO: 2231 - RNA, 19 nt, Artificial Sequence
  Description of Artificial Sequence: Synthetic oligonucleotide
gugggaaacagcaggcaag

SEQ ID NO: 2232 - RNA, 19 nt, Artificial Sequence
  Description of Artificial Sequence: Synthetic oligonucleotide
ugugggaaacagcaggcaa

SEQ ID NO: 2233 - RNA, 19 nt, Artificial Sequence
  Description of Artificial Sequence: Synthetic oligonucleotide
augugggaaacagcaggca

SEQ ID NO: 2234 - RNA, 19 nt, Artificial Sequence
  Description of Artificial Sequence: Synthetic oligonucleotide
uaugugggaaacagcaggc

SEQ ID NO: 2235 - RNA, 19 nt, Artificial Sequence
  Description of Artificial Sequence: Synthetic oligonucleotide
uuaugugggaaacagcagg

SEQ ID NO: 2236 - RNA, 19 nt, Artificial Sequence
  Description of Artificial Sequence: Synthetic oligonucleotide
uuuaugugggaaacagcag

SEQ ID NO: 2237 - RNA, 19 nt, Artificial Sequence
  Description of Artificial Sequence: Synthetic oligonucleotide
guuuaugugggaaacagca

SEQ ID NO: 2238 - RNA, 19 nt, Artificial Sequence
  Description of Artificial Sequence: Synthetic oligonucleotide
aguuuaugugggaaacagc

SEQ ID NO: 2239 - RNA, 19 nt, Artificial Sequence
  Description of Artificial Sequence: Synthetic oligonucleotide
uaguuuaugugggaaacag

SEQ ID NO: 2240 - RNA, 19 nt, Artificial Sequence
  Description of Artificial Sequence: Synthetic oligonucleotide
guaguuuaugugggaaaca

SEQ ID NO: 2241 - RNA, 19 nt, Artificial Sequence
  Description of Artificial Sequence: Synthetic oligonucleotide
gguaguuuaugugggaaac

SEQ ID NO: 2242 - RNA, 19 nt, Artificial Sequence
  Description of Artificial Sequence: Synthetic oligonucleotide
agguaguuuaugugggaaa

SEQ ID NO: 2243 - RNA, 19 nt, Artificial Sequence
  Description of Artificial Sequence: Synthetic oligonucleotide
gagguaguuuaugugggaa

SEQ ID NO: 2244 - RNA, 19 nt, Artificial Sequence
  Description of Artificial Sequence: Synthetic oligonucleotide
ugagguaguuuauguggga

SEQ ID NO: 2245 - RNA, 19 nt, Artificial Sequence
  Description of Artificial Sequence: Synthetic oligonucleotide
cugagguaguuuauguggg

SEQ ID NO: 2246 - RNA, 19 nt, Artificial Sequence
  Description of Artificial Sequence: Synthetic oligonucleotide
ccugagguaguuuaugugg

SEQ ID NO: 2247 - RNA, 19 nt, Artificial Sequence
  Description of Artificial Sequence: Synthetic oligonucleotide
uccugagguaguuuaugug

SEQ ID NO: 2248 - RNA, 19 nt, Artificial Sequence
  Description of Artificial Sequence: Synthetic oligonucleotide
cuccugagguaguuuaugu

SEQ ID NO: 2249 - RNA, 19 nt, Artificial Sequence
  Description of Artificial Sequence: Synthetic oligonucleotide
acuccugagguaguuuaug

SEQ ID NO: 2250 - RNA, 19 nt, Artificial Sequence
  Description of Artificial Sequence: Synthetic oligonucleotide
gacuccugagguaguuuau

SEQ ID NO: 2251 - RNA, 19 nt, Artificial Sequence
  Description of Artificial Sequence: Synthetic oligonucleotide
ugacuccugagguaguuua

SEQ ID NO: 2252 - RNA, 19 nt, Artificial Sequence
  Description of Artificial Sequence: Synthetic oligonucleotide
gugacuccugagguaguuu

SEQ ID NO: 2253 - RNA, 19 nt, Artificial Sequence
  Description of Artificial Sequence: Synthetic oligonucleotide
agugacuccugagguaguu

SEQ ID NO: 2254 - RNA, 19 nt, Artificial Sequence
  Description of Artificial Sequence: Synthetic oligonucleotide
cagugacuccugagguagu

SEQ ID NO: 2255 - RNA, 19 nt, Artificial Sequence
  Description of Artificial Sequence: Synthetic oligonucleotide
acagugacuccugagguag

SEQ ID NO: 2256 - RNA, 19 nt, Artificial Sequence
  Description of Artificial Sequence: Synthetic oligonucleotide
uacagugacuccugaggua

SEQ ID NO: 2257 - RNA, 19 nt, Artificial Sequence
  Description of Artificial Sequence: Synthetic oligonucleotide
uuacagugacuccugaggu

SEQ ID NO: 2258 - RNA, 19 nt, Artificial Sequence
  Description of Artificial Sequence: Synthetic oligonucleotide
uuuacagugacuccugagg

SEQ ID NO: 2259 - RNA, 19 nt, Artificial Sequence
  Description of Artificial Sequence: Synthetic oligonucleotide
uuuuacagugacuccugag

SEQ ID NO: 2260 - RNA, 19 nt, Artificial Sequence
  Description of Artificial Sequence: Synthetic oligonucleotide
auuuuacagugacuccuga

SEQ ID NO: 2261 - RNA, 19 nt, Artificial Sequence
  Description of Artificial Sequence: Synthetic oligonucleotide
uauuuuacagugacuccug

SEQ ID NO: 2262 - RNA, 19 nt, Artificial Sequence
  Description of Artificial Sequence: Synthetic oligonucleotide
uuauuuuacagugacuccu

SEQ ID NO: 2263 - RNA, 19 nt, Artificial Sequence
  Description of Artificial Sequence: Synthetic oligonucleotide
uuuauuuuacagugacucc

SEQ ID NO: 2264 - RNA, 19 nt, Artificial Sequence
  Description of Artificial Sequence: Synthetic oligonucleotide
guuuauuuuacagugacuc

SEQ ID NO: 2265 - RNA, 19 nt, Artificial Sequence
  Description of Artificial Sequence: Synthetic oligonucleotide
aguuuauuuuacagugacu

SEQ ID NO: 2266 - RNA, 19 nt, Artificial Sequence
  Description of Artificial Sequence: Synthetic oligonucleotide
caguuuauuuuacagugac

SEQ ID NO: 2267 - RNA, 19 nt, Artificial Sequence
  Description of Artificial Sequence: Synthetic oligonucleotide
ccaguuuauuuuacaguga

SEQ ID NO: 2268 - RNA, 19 nt, Artificial Sequence
  Description of Artificial Sequence: Synthetic oligonucleotide
gccaguuuauuuuacagug

SEQ ID NO: 2269 - RNA, 19 nt, Artificial Sequence
  Description of Artificial Sequence: Synthetic oligonucleotide
ggccaguuuauuuuacagu

SEQ ID NO: 2270 - RNA, 19 nt, Artificial Sequence
  Description of Artificial Sequence: Synthetic oligonucleotide
aggccaguuuauuuuacag

SEQ ID NO: 2271 - RNA, 19 nt, Artificial Sequence
  Description of Artificial Sequence: Synthetic oligonucleotide
aaggccaguuuauuuuaca

SEQ ID NO: 2272 - RNA, 19 nt, Artificial Sequence
  Description of Artificial Sequence: Synthetic oligonucleotide
caaggccaguuuauuuuac

SEQ ID NO: 2273 - RNA, 19 nt, Artificial Sequence
  Description of Artificial Sequence: Synthetic oligonucleotide
acaaggccaguuuauuuua

SEQ ID NO: 2274 - RNA, 19 nt, Artificial Sequence
  Description of Artificial Sequence: Synthetic oligonucleotide
aacaaggccaguuuauuuu

SEQ ID NO: 2275 - RNA, 19 nt, Artificial Sequence
  Description of Artificial Sequence: Synthetic oligonucleotide
caacaaggccaguuuauuu

SEQ ID NO: 2276 - RNA, 19 nt, Artificial Sequence
  Description of Artificial Sequence: Synthetic oligonucleotide
acaacaaggccaguuuauu

SEQ ID NO: 2277 - RNA, 19 nt, Artificial Sequence
  Description of Artificial Sequence: Synthetic oligonucleotide
gacaacaaggccaguuuau

SEQ ID NO: 2278 - RNA, 19 nt, Artificial Sequence
  Description of Artificial Sequence: Synthetic oligonucleotide
agacaacaaggccaguuua

SEQ ID NO: 2279 - RNA, 19 nt, Artificial Sequence
  Description of Artificial Sequence: Synthetic oligonucleotide
aagacaacaaggccaguuu

SEQ ID NO: 2280 - RNA, 19 nt, Artificial Sequence
  Description of Artificial Sequence: Synthetic oligonucleotide
uaagacaacaaggccaguu

SEQ ID NO: 2281 - RNA, 21 nt, Artificial Sequence
  Description of Artificial Sequence: Synthetic oligonucleotide
uggcuauggcuaguguuaauu

SEQ ID NO: 2282 - RNA, 21 nt, Artificial Sequence
  Description of Artificial Sequence: Synthetic oligonucleotide
aucauacaaacucuguacauu

SEQ ID NO: 2283 - RNA, 21 nt, Artificial Sequence
  Description of Artificial Sequence: Synthetic oligonucleotide
cuguacuuccuggaaucgauu

SEQ ID NO: 2284 - RNA, 21 nt, Artificial Sequence
  Description of Artificial Sequence: Synthetic oligonucleotide
uguacuuccuggaaucgaauu

SEQ ID NO: 2285 - RNA, 21 nt, Artificial Sequence
  Description of Artificial Sequence: Synthetic oligonucleotide
guacuuccuggaaucgauauu

SEQ ID NO: 2286 - RNA, 21 nt, Artificial Sequence
  Description of Artificial Sequence: Synthetic oligonucleotide
uacuuccuggaaucgauaauu

SEQ ID NO: 2287 - RNA, 21 nt, Artificial Sequence
  Description of Artificial Sequence: Synthetic oligonucleotide
cuuccuggaaucgauacuauu

SEQ ID NO: 2288 - RNA, 21 nt, Artificial Sequence
  Description of Artificial Sequence: Synthetic oligonucleotide
cuggaaucgauacuuguaauu

SEQ ID NO: 2289 - RNA, 21 nt, Artificial Sequence
  Description of Artificial Sequence: Synthetic oligonucleotide
gaaucgauacuuguauuuauu

SEQ ID NO: 2290 - RNA, 21 nt, Artificial Sequence
  Description of Artificial Sequence: Synthetic oligonucleotide
cuaguaccaaguuacgugauu

SEQ ID NO: 2291 - RNA, 21 nt, Artificial Sequence
  Description of Artificial Sequence: Synthetic oligonucleotide
uaguaccaaguuacgugcauu

SEQ ID NO: 2292 - RNA, 21 nt, Artificial Sequence
  Description of Artificial Sequence: Synthetic oligonucleotide
aguaccaaguuacgugcaauu

SEQ ID NO: 2293 - RNA, 21 nt, Artificial Sequence
  Description of Artificial Sequence: Synthetic oligonucleotide
guaccaaguuacgugcacauu

SEQ ID NO: 2294 - RNA, 21 nt, Artificial Sequence
  Description of Artificial Sequence: Synthetic oligonucleotide
uaccaaguuacgugcaccauu

SEQ ID NO: 2295 - RNA, 21 nt, Artificial Sequence
  Description of Artificial Sequence: Synthetic oligonucleotide
ccaaguuacgugcaccaaauu

SEQ ID NO: 2296 - RNA, 21 nt, Artificial Sequence
  Description of Artificial Sequence: Synthetic oligonucleotide
caaguuacgugcaccaaaauu

SEQ ID NO: 2297 - RNA, 21 nt, Artificial Sequence
  Description of Artificial Sequence: Synthetic oligonucleotide
aaguuacgugcaccaaauauu

SEQ ID NO: 2298 - RNA, 21 nt, Artificial Sequence
  Description of Artificial Sequence: Synthetic oligonucleotide
guuacgugcaccaaauuaauu

SEQ ID NO: 2299 - RNA, 21 nt, Artificial Sequence
  Description of Artificial Sequence: Synthetic oligonucleotide
uuacgugcaccaaauuauauu

SEQ ID NO: 2300 - RNA, 21 nt, Artificial Sequence
  Description of Artificial Sequence: Synthetic oligonucleotide
aagacucaaaaguaauauauu

SEQ ID NO: 2301 - RNA, 21 nt, Artificial Sequence
  Description of Artificial Sequence: Synthetic oligonucleotide
aaaaucuacuaaaaagucauu

SEQ ID NO: 2302 - RNA, 21 nt, Artificial Sequence
  Description of Artificial Sequence: Synthetic oligonucleotide
ucuacuaaaaagucucugauu

SEQ ID NO: 2303 - RNA, 21 nt, Artificial Sequence
  Description of Artificial Sequence: Synthetic oligonucleotide
ugaagacggggcuagauaauu

SEQ ID NO: 2304 - RNA, 21 nt, Artificial Sequence
  Description of Artificial Sequence: Synthetic oligonucleotide
cuagauauugggagaaacauu

SEQ ID NO: 2305 - RNA, 21 nt, Artificial Sequence
  Description of Artificial Sequence: Synthetic oligonucleotide
agcagaacggugaaagugauu

SEQ ID NO: 2306 - RNA, 21 nt, Artificial Sequence
  Description of Artificial Sequence: Synthetic oligonucleotide
aaagugggagauacauugauu

SEQ ID NO: 2307 - RNA, 21 nt, Artificial Sequence
  Description of Artificial Sequence: Synthetic oligonucleotide
aagugggagauacauuggauu

SEQ ID NO: 2308 - RNA, 21 nt, Artificial Sequence
  Description of Artificial Sequence: Synthetic oligonucleotide
agugggagauacauuggaauu

SEQ ID NO: 2309 - RNA, 21 nt, Artificial Sequence
  Description of Artificial Sequence: Synthetic oligonucleotide
ugggagauacauuggaucauu

SEQ ID NO: 2310 - RNA, 21 nt, Artificial Sequence
  Description of Artificial Sequence: Synthetic oligonucleotide
auacauuggaucuucucaauu

SEQ ID NO: 2311 - RNA, 21 nt, Artificial Sequence
  Description of Artificial Sequence: Synthetic oligonucleotide
cauuggaucuucucauugauu

SEQ ID NO: 2312 - RNA, 21 nt, Artificial Sequence
  Description of Artificial Sequence: Synthetic oligonucleotide
auuggaucuucucauuggauu

SEQ ID NO: 2313 - RNA, 21 nt, Artificial Sequence
  Description of Artificial Sequence: Synthetic oligonucleotide
uuggaucuucucauuggaauu

SEQ ID NO: 2314 - RNA, 21 nt, Artificial Sequence
  Description of Artificial Sequence: Synthetic oligonucleotide
uggaucuucucauuggagauu

SEQ ID NO: 2315 - RNA, 21 nt, Artificial Sequence
  Description of Artificial Sequence: Synthetic oligonucleotide
gaucuucucauuggagagauu

SEQ ID NO: 2316 - RNA, 21 nt, Artificial Sequence
  Description of Artificial Sequence: Synthetic oligonucleotide
uucucauuggagaggauaauu

SEQ ID NO: 2317 - RNA, 21 nt, Artificial Sequence
  Description of Artificial Sequence: Synthetic oligonucleotide
cucauuggagaggauaaaauu

SEQ ID NO: 2318 - RNA, 21 nt, Artificial Sequence
  Description of Artificial Sequence: Synthetic oligonucleotide
agacaguuaugcggauucauu

SEQ ID NO: 2319 - RNA, 21 nt, Artificial Sequence
  Description of Artificial Sequence: Synthetic oligonucleotide
gacaguuaugcggauucuauu

SEQ ID NO: 2320 - RNA, 21 nt, Artificial Sequence
  Description of Artificial Sequence: Synthetic oligonucleotide
uuaugcggauucucuugaauu

SEQ ID NO: 2321 - RNA, 21 nt, Artificial Sequence
  Description of Artificial Sequence: Synthetic oligonucleotide
uaugcggauucucuugaaauu

SEQ ID NO: 2322 - RNA, 21 nt, Artificial Sequence
  Description of Artificial Sequence: Synthetic oligonucleotide
augcggauucucuugaaaauu

SEQ ID NO: 2323 - RNA, 21 nt, Artificial Sequence
  Description of Artificial Sequence: Synthetic oligonucleotide
uacagagugguguuacggauu

SEQ ID NO: 2324 - RNA, 21 nt, Artificial Sequence
  Description of Artificial Sequence: Synthetic oligonucleotide
guguuacggcgguggaaaauu

SEQ ID NO: 2325 - RNA, 21 nt, Artificial Sequence
  Description of Artificial Sequence: Synthetic oligonucleotide
uguuacggcgguggaaaaauu

SEQ ID NO: 2326 - RNA, 21 nt, Artificial Sequence
  Description of Artificial Sequence: Synthetic oligonucleotide
guuacggcgguggaaaagauu

SEQ ID NO: 2327 - RNA, 21 nt, Artificial Sequence
  Description of Artificial Sequence: Synthetic oligonucleotide
uuacggcgguggaaaaguauu

SEQ ID NO: 2328 - RNA, 21 nt, Artificial Sequence
  Description of Artificial Sequence: Synthetic oligonucleotide
uacggcgguggaaaaguuauu

SEQ ID NO: 2329 - RNA, 21 nt, Artificial Sequence
  Description of Artificial Sequence: Synthetic oligonucleotide
cggcgguggaaaaguuuaauu

SEQ ID NO: 2330 - RNA, 21 nt, Artificial Sequence
  Description of Artificial Sequence: Synthetic oligonucleotide
aguuuaaaguugccuaagauu

SEQ ID NO: 2331 - RNA, 21 nt, Artificial Sequence
  Description of Artificial Sequence: Synthetic oligonucleotide
uuuaaaguugccuaagaaauu

SEQ ID NO: 2332 - RNA, 21 nt, Artificial Sequence
  Description of Artificial Sequence: Synthetic oligonucleotide
uggauugcuuuuuagcaaauu

SEQ ID NO: 2333 - RNA, 21 nt, Artificial Sequence
  Description of Artificial Sequence: Synthetic oligonucleotide
gaaggggucaccugaaaaauu

SEQ ID NO: 2334 - RNA, 21 nt, Artificial Sequence
  Description of Artificial Sequence: Synthetic oligonucleotide
aaauaaaguucucuuagcauu

SEQ ID NO: 2335 - RNA, 21 nt, Artificial Sequence
  Description of Artificial Sequence: Synthetic oligonucleotide
uuaacacuagccauagccauu

SEQ ID NO: 2336 - RNA, 21 nt, Artificial Sequence
  Description of Artificial Sequence: Synthetic oligonucleotide
uguacagaguuuguaugauuu

SEQ ID NO: 2337 - RNA, 21 nt, Artificial Sequence
  Description of Artificial Sequence: Synthetic oligonucleotide
ucgauuccaggaaguacaguu

SEQ ID NO: 2338 - RNA, 21 nt, Artificial Sequence
  Description of Artificial Sequence: Synthetic oligonucleotide
uucgauuccaggaaguacauu

SEQ ID NO: 2339 - RNA, 21 nt, Artificial Sequence
  Description of Artificial Sequence: Synthetic oligonucleotide
uaucgauuccaggaaguacuu

SEQ ID NO: 2340 - RNA, 21 nt, Artificial Sequence
  Description of Artificial Sequence: Synthetic oligonucleotide
uuaucgauuccaggaaguauu

SEQ ID NO: 2341 - RNA, 21 nt, Artificial Sequence
  Description of Artificial Sequence: Synthetic oligonucleotide
uaguaucgauuccaggaaguu

SEQ ID NO: 2342 - RNA, 21 nt, Artificial Sequence
  Description of Artificial Sequence: Synthetic oligonucleotide
uuacaaguaucgauuccaguu

SEQ ID NO: 2343 - RNA, 21 nt, Artificial Sequence
  Description of Artificial Sequence: Synthetic oligonucleotide
uaaauacaaguaucgauucuu

SEQ ID NO: 2344 - RNA, 21 nt, Artificial Sequence
  Description of Artificial Sequence: Synthetic oligonucleotide
ucacguaacuugguacuaguu

SEQ ID NO: 2345 - RNA, 21 nt, Artificial Sequence
  Description of Artificial Sequence: Synthetic oligonucleotide
ugcacguaacuugguacuauu

SEQ ID NO: 2346 - RNA, 21 nt, Artificial Sequence
  Description of Artificial Sequence: Synthetic oligonucleotide
uugcacguaacuugguacuuu

SEQ ID NO: 2347 - RNA, 21 nt, Artificial Sequence
  Description of Artificial Sequence: Synthetic oligonucleotide
ugugcacguaacuugguacuu

SEQ ID NO: 2348 - RNA, 21 nt, Artificial Sequence
  Description of Artificial Sequence: Synthetic oligonucleotide
uggugcacguaacuugguauu

SEQ ID NO: 2349 - RNA, 21 nt, Artificial Sequence
  Description of Artificial Sequence: Synthetic oligonucleotide
uuuggugcacguaacuugguu

SEQ ID NO: 2350 - RNA, 21 nt, Artificial Sequence
  Description of Artificial Sequence: Synthetic oligonucleotide
uuuuggugcacguaacuuguu

SEQ ID NO: 2351 - RNA, 21 nt, Artificial Sequence
  Description of Artificial Sequence: Synthetic oligonucleotide
uauuuggugcacguaacuuuu

SEQ ID NO: 2352 - RNA, 21 nt, Artificial Sequence
  Description of Artificial Sequence: Synthetic oligonucleotide
uuaauuuggugcacguaacuu

SEQ ID NO: 2353 - RNA, 21 nt, Artificial Sequence
  Description of Artificial Sequence: Synthetic oligonucleotide
uauaauuuggugcacguaauu

SEQ ID NO: 2354 - RNA, 21 nt, Artificial Sequence
  Description of Artificial Sequence: Synthetic oligonucleotide
uauauuacuuuugagucuuuu

SEQ ID NO: 2355 - RNA, 21 nt, Artificial Sequence
  Description of Artificial Sequence: Synthetic oligonucleotide
ugacuuuuuaguagauuuuuu

SEQ ID NO: 2356 - RNA, 21 nt, Artificial Sequence
  Description of Artificial Sequence: Synthetic oligonucleotide
ucagagacuuuuuaguagauu

SEQ ID NO: 2357 - RNA, 21 nt, Artificial Sequence
  Description of Artificial Sequence: Synthetic oligonucleotide
uuaucuagccccgucuucauu

SEQ ID NO: 2358 - RNA, 21 nt, Artificial Sequence
  Description of Artificial Sequence: Synthetic oligonucleotide
uguuucucccaauaucuaguu

SEQ ID NO: 2359 - RNA, 21 nt, Artificial Sequence
  Description of Artificial Sequence: Synthetic oligonucleotide
ucacuuucaccguucugcuuu

SEQ ID NO: 2360 - RNA, 21 nt, Artificial Sequence
  Description of Artificial Sequence: Synthetic oligonucleotide
ucaauguaucucccacuuuuu

SEQ ID NO: 2361 - RNA, 21 nt, Artificial Sequence
  Description of Artificial Sequence: Synthetic oligonucleotide
uccaauguaucucccacuuuu

SEQ ID NO: 2362 - RNA, 21 nt, Artificial Sequence
  Description of Artificial Sequence: Synthetic oligonucleotide
uuccaauguaucucccacuuu

SEQ ID NO: 2363 - RNA, 21 nt, Artificial Sequence
  Description of Artificial Sequence: Synthetic oligonucleotide
ugauccaauguaucucccauu

SEQ ID NO: 2364 - RNA, 21 nt, Artificial Sequence
  Description of Artificial Sequence: Synthetic oligonucleotide
uugagaagauccaauguauuu

SEQ ID NO: 2365 - RNA, 21 nt, Artificial Sequence
  Description of Artificial Sequence: Synthetic oligonucleotide
ucaaugagaagauccaauguu

SEQ ID NO: 2366 - RNA, 21 nt, Artificial Sequence
  Description of Artificial Sequence: Synthetic oligonucleotide
uccaaugagaagauccaauuu

SEQ ID NO: 2367 - RNA, 21 nt, Artificial Sequence
  Description of Artificial Sequence: Synthetic oligonucleotide
uuccaaugagaagauccaauu

SEQ ID NO: 2368 - RNA, 21 nt, Artificial Sequence
  Description of Artificial Sequence: Synthetic oligonucleotide
ucuccaaugagaagauccauu

SEQ ID NO: 2369 - RNA, 21 nt, Artificial Sequence
  Description of Artificial Sequence: Synthetic oligonucleotide
ucucuccaaugagaagaucuu

SEQ ID NO: 2370 - RNA, 21 nt, Artificial Sequence
  Description of Artificial Sequence: Synthetic oligonucleotide
uuauccucuccaaugagaauu

SEQ ID NO: 2371 - RNA, 21 nt, Artificial Sequence
  Description of Artificial Sequence: Synthetic oligonucleotide
uuuuauccucuccaaugaguu

SEQ ID NO: 2372 - RNA, 21 nt, Artificial Sequence
  Description of Artificial Sequence: Synthetic oligonucleotide
ugaauccgcauaacugucuuu

SEQ ID NO: 2373 - RNA, 21 nt, Artificial Sequence
  Description of Artificial Sequence: Synthetic oligonucleotide
uagaauccgcauaacugucuu

SEQ ID NO: 2374 - RNA, 21 nt, Artificial Sequence
  Description of Artificial Sequence: Synthetic oligonucleotide
uucaagagaauccgcauaauu

SEQ ID NO: 2375 - RNA, 21 nt, Artificial Sequence
  Description of Artificial Sequence: Synthetic oligonucleotide
uuucaagagaauccgcauauu

SEQ ID NO: 2376 - RNA, 21 nt, Artificial Sequence
  Description of Artificial Sequence: Synthetic oligonucleotide
uuuucaagagaauccgcauuu

SEQ ID NO: 2377 - RNA, 21 nt, Artificial Sequence
  Description of Artificial Sequence: Synthetic oligonucleotide
uccguaacaccacucuguauu

SEQ ID NO: 2378 - RNA, 21 nt, Artificial Sequence
  Description of Artificial Sequence: Synthetic oligonucleotide
uuuuccaccgccguaacacuu

SEQ ID NO: 2379 - RNA, 21 nt, Artificial Sequence
  Description of Artificial Sequence: Synthetic oligonucleotide
uuuuuccaccgccguaacauu

SEQ ID NO: 2380 - RNA, 21 nt, Artificial Sequence
  Description of Artificial Sequence: Synthetic oligonucleotide
ucuuuuccaccgccguaacuu

SEQ ID NO: 2381 - RNA, 21 nt, Artificial Sequence
  Description of Artificial Sequence: Synthetic oligonucleotide
uacuuuuccaccgccguaauu

SEQ ID NO: 2382 - RNA, 21 nt, Artificial Sequence
  Description of Artificial Sequence: Synthetic oligonucleotide
uaacuuuuccaccgccguauu

SEQ ID NO: 2383 - RNA, 21 nt, Artificial Sequence
  Description of Artificial Sequence: Synthetic oligonucleotide
uuaaacuuuuccaccgccguu

SEQ ID NO: 2384 - RNA, 21 nt, Artificial Sequence
  Description of Artificial Sequence: Synthetic oligonucleotide
ucuuaggcaacuuuaaacuuu

SEQ ID NO: 2385 - RNA, 21 nt, Artificial Sequence
  Description of Artificial Sequence: Synthetic oligonucleotide
uuucuuaggcaacuuuaaauu

SEQ ID NO: 2386 - RNA, 21 nt, Artificial Sequence
  Description of Artificial Sequence: Synthetic oligonucleotide
uuugcuaaaaagcaauccauu

SEQ ID NO: 2387 - RNA, 21 nt, Artificial Sequence
  Description of Artificial Sequence: Synthetic oligonucleotide
uuuuucaggugaccccuucuu

SEQ ID NO: 2388 - RNA, 21 nt, Artificial Sequence
  Description of Artificial Sequence: Synthetic oligonucleotide
ugcuaagagaacuuuauuuuu

SEQ ID NO: 2389 - RNA, 21 nt, Artificial Sequence
  Description of Artificial Sequence: Synthetic oligonucleotide
uggcuauggcuaguguuaauu

SEQ ID NO: 2390 - RNA, 21 nt, Artificial Sequence
  Description of Artificial Sequence: Synthetic oligonucleotide
aucauacaaacucuguacauu

SEQ ID NO: 2391 - RNA, 21 nt, Artificial Sequence
  Description of Artificial Sequence: Synthetic oligonucleotide
cuguacuuccuggaaucgauu

SEQ ID NO: 2392 - RNA, 21 nt, Artificial Sequence
  Description of Artificial Sequence: Synthetic oligonucleotide
uguacuuccuggaaucgaauu

SEQ ID NO: 2393 - RNA, 21 nt, Artificial Sequence
  Description of Artificial Sequence: Synthetic oligonucleotide
guacuuccuggaaucgauauu

SEQ ID NO: 2394 - RNA, 21 nt, Artificial Sequence
  Description of Artificial Sequence: Synthetic oligonucleotide
uacuuccuggaaucgauaauu

SEQ ID NO: 2395 - RNA, 21 nt, Artificial Sequence
  Description of Artificial Sequence: Synthetic oligonucleotide
cuuccuggaaucgauacuauu

SEQ ID NO: 2396 - RNA, 21 nt, Artificial Sequence
  Description of Artificial Sequence: Synthetic oligonucleotide
cuggaaucgauacuuguaauu

SEQ ID NO: 2397 - RNA, 21 nt, Artificial Sequence
  Description of Artificial Sequence: Synthetic oligonucleotide
gaaucgauacuuguauuuauu

SEQ ID NO: 2398 - RNA, 21 nt, Artificial Sequence
  Description of Artificial Sequence: Synthetic oligonucleotide
cuaguaccaaguuacgugauu

SEQ ID NO: 2399 - RNA, 21 nt, Artificial Sequence
  Description of Artificial Sequence: Synthetic oligonucleotide
uaguaccaaguuacgugcauu

SEQ ID NO: 2400 - RNA, 21 nt, Artificial Sequence
  Description of Artificial Sequence: Synthetic oligonucleotide
aguaccaaguuacgugcaauu

SEQ ID NO: 2401 - RNA, 21 nt, Artificial Sequence
  Description of Artificial Sequence: Synthetic oligonucleotide
guaccaaguuacgugcacauu

SEQ ID NO: 2402 - RNA, 21 nt, Artificial Sequence
  Description of Artificial Sequence: Synthetic oligonucleotide
uaccaaguuacgugcaccauu

SEQ ID NO: 2403 - RNA, 21 nt, Artificial Sequence
  Description of Artificial Sequence: Synthetic oligonucleotide
ccaaguuacgugcaccaaauu

SEQ ID NO: 2404 - RNA, 21 nt, Artificial Sequence
  Description of Artificial Sequence: Synthetic oligonucleotide
caaguuacgugcaccaaaauu

SEQ ID NO: 2405 - RNA, 21 nt, Artificial Sequence
  Description of Artificial Sequence: Synthetic oligonucleotide
aaguuacgugcaccaaauauu

SEQ ID NO: 2406 - RNA, 21 nt, Artificial Sequence
  Description of Artificial Sequence: Synthetic oligonucleotide
guuacgugcaccaaauuaauu

SEQ ID NO: 2407 - RNA, 21 nt, Artificial Sequence
  Description of Artificial Sequence: Synthetic oligonucleotide
uuacgugcaccaaauuauauu

SEQ ID NO: 2408 - RNA, 21 nt, Artificial Sequence
  Description of Artificial Sequence: Synthetic oligonucleotide
aagacucaaaaguaauauauu

SEQ ID NO: 2409 - RNA, 21 nt, Artificial Sequence
  Description of Artificial Sequence: Synthetic oligonucleotide
aaaaucuacuaaaaagucauu

SEQ ID NO: 2410 - RNA, 21 nt, Artificial Sequence
  Description of Artificial Sequence: Synthetic oligonucleotide
ucuacuaaaaagucucugauu

SEQ ID NO: 2411 - RNA, 21 nt, Artificial Sequence
  Description of Artificial Sequence: Synthetic oligonucleotide
ugaagacggggcuagauaauu

SEQ ID NO: 2412 - RNA, 21 nt, Artificial Sequence
  Description of Artificial Sequence: Synthetic oligonucleotide
cuagauauugggagaaacauu

SEQ ID NO: 2413 - RNA, 21 nt, Artificial Sequence
  Description of Artificial Sequence: Synthetic oligonucleotide
agcagaacggugaaagugauu

SEQ ID NO: 2414 - RNA, 21 nt, Artificial Sequence
  Description of Artificial Sequence: Synthetic oligonucleotide
aaagugggagauacauugauu

SEQ ID NO: 2415 - RNA, 21 nt, Artificial Sequence
  Description of Artificial Sequence: Synthetic oligonucleotide
aagugggagauacauuggauu

SEQ ID NO: 2416 - RNA, 21 nt, Artificial Sequence
  Description of Artificial Sequence: Synthetic oligonucleotide
agugggagauacauuggaauu

SEQ ID NO: 2417 - RNA, 21 nt, Artificial Sequence
  Description of Artificial Sequence: Synthetic oligonucleotide
ugggagauacauuggaucauu

SEQ ID NO: 2418 - RNA, 21 nt, Artificial Sequence
  Description of Artificial Sequence: Synthetic oligonucleotide
auacauuggaucuucucaauu

SEQ ID NO: 2419 - RNA, 21 nt, Artificial Sequence
  Description of Artificial Sequence: Synthetic oligonucleotide
cauuggaucuucucauugauu

SEQ ID NO: 2420 - RNA, 21 nt, Artificial Sequence
  Description of Artificial Sequence: Synthetic oligonucleotide
auuggaucuucucauuggauu

SEQ ID NO: 2421 - RNA, 21 nt, Artificial Sequence
  Description of Artificial Sequence: Synthetic oligonucleotide
uuggaucuucucauuggaauu

SEQ ID NO: 2422 - RNA, 21 nt, Artificial Sequence
  Description of Artificial Sequence: Synthetic oligonucleotide
uggaucuucucauuggagauu

SEQ ID NO: 2423 - RNA, 21 nt, Artificial Sequence
  Description of Artificial Sequence: Synthetic oligonucleotide
gaucuucucauuggagagauu

SEQ ID NO: 2424 - RNA, 21 nt, Artificial Sequence
  Description of Artificial Sequence: Synthetic oligonucleotide
uucucauuggagaggauaauu

SEQ ID NO: 2425 - RNA, 21 nt, Artificial Sequence
  Description of Artificial Sequence: Synthetic oligonucleotide
cucauuggagaggauaaaauu

SEQ ID NO: 2426 - RNA, 21 nt, Artificial Sequence
  Description of Artificial Sequence: Synthetic oligonucleotide
agacaguuaugcggauucauu

SEQ ID NO: 2427 - RNA, 21 nt, Artificial Sequence
  Description of Artificial Sequence: Synthetic oligonucleotide
gacaguuaugcggauucuauu

SEQ ID NO: 2428 - RNA, 21 nt, Artificial Sequence
  Description of Artificial Sequence: Synthetic oligonucleotide
uuaugcggauucucuugaauu

SEQ ID NO: 2429 - RNA, 21 nt, Artificial Sequence
  Description of Artificial Sequence: Synthetic oligonucleotide
uaugcggauucucuugaaauu

SEQ ID NO: 2430 - RNA, 21 nt, Artificial Sequence
  Description of Artificial Sequence: Synthetic oligonucleotide
augcggauucucuugaaaauu

SEQ ID NO: 2431 - RNA, 21 nt, Artificial Sequence
  Description of Artificial Sequence: Synthetic oligonucleotide
uacagagugguguuacggauu

SEQ ID NO: 2432 - RNA, 21 nt, Artificial Sequence
  Description of Artificial Sequence: Synthetic oligonucleotide
guguuacggcgguggaaaauu

SEQ ID NO: 2433 - RNA, 21 nt, Artificial Sequence
  Description of Artificial Sequence: Synthetic oligonucleotide
uguuacggcgguggaaaaauu

SEQ ID NO: 2434 - RNA, 21 nt, Artificial Sequence
  Description of Artificial Sequence: Synthetic oligonucleotide
guuacggcgguggaaaagauu

SEQ ID NO: 2435 - RNA, 21 nt, Artificial Sequence
  Description of Artificial Sequence: Synthetic oligonucleotide
uuacggcgguggaaaaguauu

SEQ ID NO: 2436 - RNA, 21 nt, Artificial Sequence
  Description of Artificial Sequence: Synthetic oligonucleotide
uacggcgguggaaaaguuauu

SEQ ID NO: 2437 - RNA, 21 nt, Artificial Sequence
  Description of Artificial Sequence: Synthetic oligonucleotide
cggcgguggaaaaguuuaauu

SEQ ID NO: 2438 - RNA, 21 nt, Artificial Sequence
  Description of Artificial Sequence: Synthetic oligonucleotide
aguuuaaaguugccuaagauu

SEQ ID NO: 2439 - RNA, 21 nt, Artificial Sequence
  Description of Artificial Sequence: Synthetic oligonucleotide
uuuaaaguugccuaagaaauu

SEQ ID NO: 2440 - RNA, 21 nt, Artificial Sequence
  Description of Artificial Sequence: Synthetic oligonucleotide
uggauugcuuuuuagcaaauu

SEQ ID NO: 2441 - RNA, 21 nt, Artificial Sequence
  Description of Artificial Sequence: Synthetic oligonucleotide
gaaggggucaccugaaaaauu

SEQ ID NO: 2442 - RNA, 21 nt, Artificial Sequence
  Description of Artificial Sequence: Synthetic oligonucleotide
aaauaaaguucucuuagcauu

SEQ ID NO: 2443 - DNA, 1146 bp, Homo sapiens
ggggtggggagggagcgagaggaatccgaccctgtctcagcccacagcctccgaggtctccaagtaaagggaaggatctttagctgcattagacttcaaagcgtttagaccagtttctccatcttacggagcggtgaacgggctcaggaatgtggagcgtttcctggcgtcaagcaggtcaaagtcagcgctgctttttttacagacactgcttttcttacagtcttcgactataaactctacaagaataggaatcttcgtatttttttcctctgctgaattcctagtgcccagattagtgcttggcacatgattataagcgccatggctatggctagtgttaaattgcttgccggtgttttaagaaagccagatgcctggattggactctggggtgttctccgagggacaccttcatcatacaaactctgtacttcctggaatcgatacttgtatttttctagtaccaagttacgtgcaccaaattataaaacacttttttataatattttctcactgagactcccagggcttttactatctccagaatgtatttttcctttttccgtaagactcaaaagtaatataaggtctacaaaatctactaaaaagtctctgcaaaaagtagatgaagaggactctgatgaagaaagccatcatgatgagatgagtgagcaggaagaggagcttgaggatgatcctactgtagtcaaaaactataaagacctggaaaaagcagttcagtcttttcggtatgatgttgtcctgaagacggggctagatattgggagaaacaaagtggaagatgctttctacaaaggtgaactcaggctgaatgaggaaaaattatggaagaaaagcagaacggtgaaagtgggagatacattggatcttctcattggagaggataaagaagcaggaacagagacagttatgcggattctcttgaaaaaagtgtttgaagagaagactgaaagtgaaaaatacagagtggtgttacggcggtggaaaagtttaaagttgcctaagaagagaatgtctaaataaatggattgctttttagcaatagagctgctttctagtggtaaaggaaggggtcacctgaaaaataggacatttttattaaaataaagttctcttagcgtt

SEQ ID NO: 2444 - RNA, 21 nt, Artificial Sequence
  Description of Artificial Sequence: Synthetic oligonucleotide
  modified_base (1)..(1): 2' fluoro-modified a, c, u, g, or other
  misc_feature (1)..(2): Phosphorothioate linkage
  modified_base (2)..(2): 2' O-methyl modified a, c, u, g, or other
  misc_feature (2)..(3): Phosphorothioate linkage
  modified_base (3)..(3): 2' fluoro-modified a, c, u, g, or other
  modified_base (4)..(4): 2' O-methyl modified a, c, u, g, or other
  modified_base (5)..(5): 2' fluoro-modified a, c, u, g, or other
  modified_base (6)..(6): 2' O-methyl modified a, c, u, g, or other
  modified_base (7)..(7): 2' fluoro-modified a, c, u, g, or other
  modified_base (8)..(8): 2' fluoro-modified a, c, u, g, or other
  modified_base (9)..(9): 2' fluoro-modified a, c, u, g, or other
  modified_base (10)..(10): 2' O-methyl modified a, c, u, g, or other
  modified_base (11)..(11): 2' fluoro-modified a, c, u, g, or other
  modified_base (12)..(12): 2' O-methyl modified a, c, u, g, or other
  modified_base (13)..(13): 2' fluoro-modified a, c, u, g, or other
  modified_base (14)..(14): 2' O-methyl modified a, c, u, g, or other
  modified_base (15)..(15): 2' fluoro-modified a, c, u, g, or other
  modified_base (16)..(16): 2' O-methyl modified a, c, u, g, or other
  modified_base (17)..(17): 2' fluoro-modified a, c, u, g, or other
  modified_base (18)..(18): 2' O-methyl modified a, c, u, g, or other
  modified_base (19)..(19): 2' fluoro-modified a, c, u, g, or other
  misc_feature (19)..(20): Phosphorothioate linkage
  modified_base (20)..(20): 2' O-methyl modified a, c, u, g, or other
  misc_feature (20)..(21): Phosphorothioate linkage
  modified_base (21)..(21): 2' O-methyl modified a, c, u, g, or other
nnnnnnnnnnnnnnnnnnnnn

SEQ ID NO: 2445 - RNA, 21 nt, Artificial Sequence
  Description of Artificial Sequence: Synthetic oligonucleotide
  modified_base (1)..(1): 2' O-methyl modified a, c, u, g, or other
  misc_feature (1)..(2): Phosphorothioate linkage
  modified_base (2)..(2): 2' O-methyl modified a, c, u, g, or other
  misc_feature (2)..(3): Phosphorothioate linkage
  modified_base (3)..(3): 2' O-methyl modified a, c, u, g, or other
  modified_base (4)..(4): 2' O-methyl modified a, c, u, g, or other
  modified_base (5)..(5): 2' fluoro-modified a, c, u, g, or other
  modified_base (6)..(6): 2' O-methyl modified a, c, u, g, or other
  modified_base (7)..(7): 2' fluoro-modified a, c, u, g, or other
  modified_base (8)..(8): 2' fluoro-modified a, c, u, g, or other
  modified_base (9)..(9): 2' fluoro-modified a, c, u, g, or other
  modified_base (10)..(10): 2' O-methyl modified a, c, u, g, or other
  modified_base (11)..(11): 2' O-methyl modified a, c, u, g, or other
  modified_base (12)..(12): 2' O-methyl modified a, c, u, g, or other
  modified_base (13)..(13): 2' O-methyl modified a, c, u, g, or other
  modified_base (14)..(14): 2' O-methyl modified a, c, u, g, or other
  modified_base (15)..(15): 2' O-methyl modified a, c, u, g, or other
  modified_base (16)..(16): 2' O-methyl modified a, c, u, g, or other
  modified_base (17)..(17): 2' O-methyl modified a, c, u, g, or other
  modified_base (18)..(18): 2' O-methyl modified a, c, u, g, or other
  modified_base (19)..(19): 2' O-methyl modified a, c, u, g, or other
  misc_feature (19)..(20): Phosphorothioate linkage
  modified_base (20)..(20): 2' O-methyl modified a, c, u, g, or other
  misc_feature (20)..(21): Phosphorothioate linkage
  modified_base (21)..(21): 2' O-methyl modified a, c, u, g, or other
nnnnnnnnnnnnnnnnnnnnn

SEQ ID NO: 2446 - RNA, 21 nt, Artificial Sequence
  Description of Artificial Sequence: Synthetic oligonucleotide
  modified_base (1)..(1): 2' O-methyl modified a, c, u, g, or other
  misc_feature (1)..(2): Phosphorothioate linkage
  modified_base (2)..(2): 2' O-methyl modified a, c, u, g, or other
  misc_feature (2)..(3): Phosphorothioate linkage
  modified_base (3)..(3): 2' O-methyl modified a, c, u, g, or other
  modified_base (4)..(4): 2' O-methyl modified a, c, u, g, or other
  modified_base (5)..(5): 2' fluoro-modified a, c, u, g, or other
  modified_base (6)..(6): 2' O-methyl modified a, c, u, g, or other
  modified_base (7)..(7): 2' fluoro-modified a, c, u, g, or other
  modified_base (8)..(8): 2' O-methyl modified a, c, u, g, or other
  modified_base (9)..(9): 2' fluoro-modified a, c, u, g, or other
  modified_base (10)..(10): 2' O-methyl modified a, c, u, g, or other
  modified_base (11)..(11): 2' O-methyl modified a, c, u, g, or other
  modified_base (12)..(12): 2' O-methyl modified a, c, u, g, or other
  modified_base (13)..(13): 2' O-methyl modified a, c, u, g, or other
  modified_base (14)..(14): 2' O-methyl modified a, c, u, g, or other
  modified_base (15)..(15): 2' O-methyl modified a, c, u, g, or other
  modified_base (16)..(16): 2' O-methyl modified a, c, u, g, or other
  modified_base (17)..(17): 2' O-methyl modified a, c, u, g, or other
  modified_base (18)..(18): 2' O-methyl modified a, c, u, g, or other
  modified_base (19)..(19): 2' O-methyl modified a, c, u, g, or other
  misc_feature (19)..(20): Phosphorothioate linkage
  modified_base (20)..(20): 2' O-methyl modified a, c, u, g, or other
  misc_feature (20)..(21): Phosphorothioate linkage
  modified_base (21)..(21): 2' O-methyl modified a, c, u, g, or other
nnnnnnnnnnnnnnnnnnnnn

SEQ ID NO: 2447 - RNA, 22 nt, Artificial Sequence
  Description of Artificial Sequence: Synthetic oligonucleotide
  modified_base (1)..(1): 2' fluoro-modified a, c, u, g, or other
  misc_feature (1)..(2): Phosphorothioate linkage
  modified_base (2)..(2): 2' O-methyl modified a, c, u, g, or other
  misc_feature (2)..(3): Phosphorothioate linkage
  modified_base (3)..(3): 2' fluoro-modified a, c, u, g, or other
  modified_base (4)..(4): 2' O-methyl modified a, c, u, g, or other
  modified_base (5)..(5): 2' fluoro-modified a, c, u, g, or other
  modified_base (6)..(6): 2' O-methyl modified a, c, u, g, or other
  modified_base (7)..(7): 2' fluoro-modified a, c, u, g, or other
  modified_base (8)..(8): 2' fluoro-modified a, c, u, g, or other
  modified_base (9)..(9): 2' fluoro-modified a, c, u, g, or other
  modified_base (10)..(10): 2' O-methyl modified a, c, u, g, or other
  modified_base (11)..(11): 2' fluoro-modified a, c, u, g, or other
  modified_base (12)..(12): 2' O-methyl modified a, c, u, g, or other
  modified_base (13)..(13): 2' fluoro-modified a, c, u, g, or other
  modified_base (14)..(14): 2' O-methyl modified a, c, u, g, or other
  modified_base (15)..(15): 2' fluoro-modified a, c, u, g, or other
  modified_base (16)..(16): 2' O-methyl modified a, c, u, g, or other
  modified_base (17)..(17): 2' fluoro-modified a, c, u, g, or other
  modified_base (18)..(18): 2' O-methyl modified a, c, u, g, or other
  modified_base (19)..(19): 2' fluoro-modified a, c, u, g, or other
  misc_feature (19)..(20): Phosphorothioate linkage
  modified_base (20)..(20): 2' O-methyl modified a, c, u, g, or other
  misc_feature (20)..(21): Phosphorothioate linkage
  modified_base (21)..(21): 2' O-methyl modified a, c, u, g, or other
  modified_base (22)..(22): a, c, u, g, unknown or other
nnnnnnnnnnnnnnnnnnnnnn

SEQ ID NO: 2448 - RNA, 22 nt, Artificial Sequence
  Description of Artificial Sequence: Synthetic oligonucleotide
  modified_base (1)..(1): 2' O-methyl modified a, c, u, g, or other
  misc_feature (1)..(2): Phosphorothioate linkage
  modified_base (2)..(2): 2' O-methyl modified a, c, u, g, or other
  misc_feature (2)..(3): Phosphorothioate linkage
  modified_base (3)..(3): 2' O-methyl modified a, c, u, g, or other
  modified_base (4)..(4): 2' O-methyl modified a, c, u, g, or other
  modified_base (5)..(5): 2' fluoro-modified a, c, u, g, or other
  modified_base (6)..(6): 2' O-methyl modified a, c, u, g, or other
  modified_base (7)..(7): 2' fluoro-modified a, c, u, g, or other
  modified_base (8)..(8): 2' fluoro-modified a, c, u, g, or other
  modified_base (9)..(9): 2' fluoro-modified a, c, u, g, or other
  modified_base (10)..(10): 2' O-methyl modified a, c, u, g, or other
  modified_base (11)..(11): 2' O-methyl modified a, c, u, g, or other
  modified_base (12)..(12): 2' O-methyl modified a, c, u, g, or other
  modified_base (13)..(13): 2' O-methyl modified a, c, u, g, or other
  modified_base (14)..(14): 2' O-methyl modified a, c, u, g, or other
  modified_base (15)..(15): 2' O-methyl modified a, c, u, g, or other
  modified_base (16)..(16): 2' O-methyl modified a, c, u, g, or other
  modified_base (17)..(17): 2' O-methyl modified a, c, u, g, or other
  modified_base (18)..(18): 2' O-methyl modified a, c, u, g, or other
  modified_base (19)..(19): 2' O-methyl modified a, c, u, g, or other
  misc_feature (19)..(20): Phosphorothioate linkage
  modified_base (20)..(20): 2' O-methyl modified a, c, u, g, or other
  misc_feature (20)..(21): Phosphorothioate linkage
  modified_base (21)..(21): 2' O-methyl modified a, c, u, g, or other
  modified_base (22)..(22): a, c, u, g, unknown or other
nnnnnnnnnnnnnnnnnnnnnn

SEQ ID NO: 2449 - RNA, 21 nt, Artificial Sequence
  Description of Artificial Sequence: Synthetic oligonucleotide
  modified_base (1)..(1): 2' fluoro-modified a, c, u, g, or other
  misc_feature (1)..(2): Phosphorothioate linkage
  modified_base (2)..(2): 2' O-methyl modified a, c, u, g, or other
  misc_feature (2)..(3): Phosphorothioate linkage
  modified_base (3)..(3): 2' fluoro-modified a, c, u, g, or other
  modified_base (4)..(4): 2' O-methyl modified a, c, u, g, or other
  modified_base (5)..(5): 2' fluoro-modified a, c, u, g, or other
  modified_base (6)..(6): 2' O-methyl modified a, c, u, g, or other
  modified_base (7)..(7): 2' fluoro-modified a, c, u, g, or other
  modified_base (8)..(8): 2' O-methyl modified a, c, u, g, or other
  modified_base (9)..(9): 2' fluoro-modified a, c, u, g, or other
  modified_base (10)..(10): 2' O-methyl modified a, c, u, g, or other
  modified_base (11)..(11): 2' fluoro-modified a, c, u, g, or other
  modified_base (12)..(12): 2' O-methyl modified a, c, u, g, or other
  modified_base (13)..(13): 2' fluoro-modified a, c, u, g, or other
  modified_base (14)..(14): 2' O-methyl modified a, c, u, g, or other
  modified_base (15)..(15): 2' fluoro-modified a, c, u, g, or other
  modified_base (16)..(16): 2' O-methyl modified a, c, u, g, or other
  modified_base (17)..(17): 2' fluoro-modified a, c, u, g, or other
  modified_base (18)..(18): 2' O-methyl modified a, c, u, g, or other
  modified_base (19)..(19): 2' fluoro-modified a, c, u, g, or other
  misc_feature (19)..(20): Phosphorothioate linkage
  modified_base (20)..(20): 2' O-methyl modified a, c, u, g, or other
  misc_feature (20)..(21): Phosphorothioate linkage
  modified_base (21)..(21): 2' O-methyl modified a, c, u, g, or other
nnnnnnnnnnnnnnnnnnnnn

SEQ ID NO: 2450 - RNA, 21 nt, Artificial Sequence
  Description of Artificial Sequence: Synthetic oligonucleotide
  modified_base (1)..(1): 2' O-methyl modified a, c, u, g, or other
  misc_feature (1)..(2): Phosphorothioate linkage
  modified_base (2)..(2): 2' O-methyl modified a, c, u, g, or other
  misc_feature (2)..(3): Phosphorothioate linkage
  modified_base (3)..(3): 2' O-methyl modified a, c, u, g, or other
  modified_base (4)..(4): 2' O-methyl modified a, c, u, g, or other
  modified_base (5)..(5): 2' fluoro-modified a, c, u, g, or other
  modified_base (6)..(6): 2' fluoro-modified a, c, u, g, or other
  modified_base (7)..(7): 2' fluoro-modified a, c, u, g, or other
  modified_base (8)..(8): 2' fluoro-modified a, c, u, g, or other
  modified_base (9)..(9): 2' fluoro-modified a, c, u, g, or other
  modified_base (10)..(10): 2' O-methyl modified a, c, u, g, or other
  modified_base (11)..(11): 2' O-methyl modified a, c, u, g, or other
  modified_base (12)..(12): 2' O-methyl modified a, c, u, g, or other
  modified_base (13)..(13): 2' O-methyl modified a, c, u, g, or other
  modified_base (14)..(14): 2' O-methyl modified a, c, u, g, or other
  modified_base (15)..(15): 2' O-methyl modified a, c, u, g, or other
  modified_base (16)..(16): 2' O-methyl modified a, c, u, g, or other
  modified_base (17)..(17): 2' O-methyl modified a, c, u, g, or other
  modified_base (18)..(18): 2' O-methyl modified a, c, u, g, or other
  modified_base (19)..(19): 2' O-methyl modified a, c, u, g, or other
  misc_feature (19)..(20): Phosphorothioate linkage
  modified_base (20)..(20): 2' O-methyl modified a, c, u, g, or other
  misc_feature (20)..(21): Phosphorothioate linkage
  modified_base (21)..(21): 2' O-methyl modified a, c, u, g, or other
nnnnnnnnnnnnnnnnnnnnn

SEQ ID NO: 2451 - RNA, 21 nt, Artificial Sequence
  Description of Artificial Sequence: Synthetic oligonucleotide
  modified_base (1)..(1): 2' O-methyl modified a, c, u, g, or other
  misc_feature (1)..(2): Phosphorothioate linkage
  modified_base (2)..(2): 2' O-methyl modified a, c, u, g, or other
  misc_feature (2)..(3): Phosphorothioate linkage
  modified_base (3)..(3): 2' O-methyl modified a, c, u, g, or other
  modified_base (4)..(4): 2' O-methyl modified a, c, u, g, or other
  modified_base (5)..(5): 2' O-methyl modified a, c, u, g, or other
  modified_base (6)..(6): 2' fluoro-modified a, c, u, g, or other
  modified_base (7)..(7): 2' fluoro-modified a, c, u, g, or other
  modified_base (8)..(8): 2' fluoro-modified a, c, u, g, or other
  modified_base (9)..(9): 2' fluoro-modified a, c, u, g, or other
  modified_base (10)..(10): 2' O-methyl modified a, c, u, g, or other
  modified_base (11)..(11): 2' O-methyl modified a, c, u, g, or other
  modified_base (12)..(12): 2' O-methyl modified a, c, u, g, or other
  modified_base (13)..(13): 2' O-methyl modified a, c, u, g, or other
  modified_base (14)..(14): 2' O-methyl modified a, c, u, g, or other
  modified_base (15)..(15): 2' O-methyl modified a, c, u, g, or other
  modified_base (16)..(16): 2' O-methyl modified a, c, u, g, or other
  modified_base (17)..(17): 2' O-methyl modified a, c, u, g, or other
  modified_base (18)..(18): 2' O-methyl modified a, c, u, g, or other
  modified_base (19)..(19): 2' O-methyl modified a, c, u, g, or other
  misc_feature (19)..(20): Phosphorothioate linkage
  modified_base (20)..(20): 2' O-methyl modified a, c, u, g, or other
  misc_feature (20)..(21): Phosphorothioate linkage
  modified_base (21)..(21): 2' O-methyl modified a, c, u, g, or other
nnnnnnnnnnnnnnnnnnnnn

SEQ ID NO: 2452 - RNA, 21 nt, Artificial Sequence
  Description of Artificial Sequence: Synthetic oligonucleotide
  modified_base (1)..(1): 2' O-methyl modified a, c, u, g, or other
  misc_feature (1)..(2): Phosphorothioate linkage
  modified_base (2)..(2): 2' O-methyl modified a, c, u, g, or other
  misc_feature (2)..(3): Phosphorothioate linkage
  modified_base (3)..(3): 2' O-methyl modified a, c, u, g, or other
  modified_base (4)..(4): 2' O-methyl modified a, c, u, g, or other
  modified_base (5)..(5): 2' O-methyl modified a, c, u, g, or other
  modified_base (6)..(6): 2' O-methyl modified a, c, u, g, or other
  modified_base (7)..(7): 2' fluoro-modified a, c, u, g, or other
  modified_base (8)..(8): 2' fluoro-modified a, c, u, g, or other
  modified_base (9)..(9): 2' fluoro-modified a, c, u, g, or other
  modified_base (10)..(10): 2' fluoro-modified a, c, u, g, or other
  modified_base (11)..(11): 2' O-methyl modified a, c, u, g, or other
  modified_base (12)..(12): 2' O-methyl modified a, c, u, g, or other
  modified_base (13)..(13): 2' O-methyl modified a, c, u, g, or other
  modified_base (14)..(14): 2' O-methyl modified a, c, u, g, or other
  modified_base (15)..(15): 2' O-methyl modified a, c, u, g, or other
  modified_base (16)..(16): 2' O-methyl modified a, c, u, g, or other
  modified_base (17)..(17): 2' O-methyl modified a, c, u, g, or other
  modified_base (18)..(18): 2' O-methyl modified a, c, u, g, or other
  modified_base (19)..(19): 2' O-methyl modified a, c, u, g, or other
  misc_feature (19)..(20): Phosphorothioate linkage
  modified_base (20)..(20): 2' O-methyl modified a, c, u, g, or other
  misc_feature (20)..(21): Phosphorothioate linkage
  modified_base (21)..(21): 2' O-methyl modified a, c, u, g, or other
nnnnnnnnnnnnnnnnnnnnn

SEQ ID NO: 2453 - RNA, 21 nt, Artificial Sequence
  Description of Artificial Sequence: Synthetic oligonucleotide
  modified_base (1)..(1): 2' O-methyl modified a, c, u, g, or other
  misc_feature (1)..(2): Phosphorothioate linkage
  modified_base (2)..(2): 2' fluoro-modified a, c, u, g, or other
  misc_feature (2)..(3): Phosphorothioate linkage
  modified_base (3)..(3): 2' O-methyl modified a, c, u, g, or other
  modified_base (4)..(4): 2' fluoro-modified a, c, u, g, or other
  modified_base (5)..(5): 2' O-methyl modified a, c, u, g, or other
  modified_base (6)..(6): 2' fluoro-modified a, c, u, g, or other
  modified_base (7)..(7): 2' O-methyl modified a, c, u, g, or other
  modified_base (8)..(8): 2' fluoro-modified a, c, u, g, or other
  modified_base (9)..(9): 2' O-methyl modified a, c, u, g, or other
  modified_base (10)..(10): 2' fluoro-modified a, c, u, g, or other
  modified_base (11)..(11): 2' O-methyl modified a, c, u, g, or other
  modified_base (12)..(12): 2' O-methyl modified a, c, u, g, or other
  modified_base (13)..(13): 2' O-methyl modified a, c, u, g, or other
  modified_base (14)..(14): 2' fluoro-modified a, c, u, g, or other
  modified_base (15)..(15): 2' O-methyl modified a, c, u, g, or other
  modified_base (16)..(16): 2' fluoro-modified a, c, u, g, or other
  modified_base (17)..(17): 2' O-methyl modified a, c, u, g, or other
  modified_base (18)..(18): 2' fluoro-modified a, c, u, g, or other
  modified_base (19)..(19): 2' O-methyl modified a, c, u, g, or other
  misc_feature (19)..(20): Phosphorothioate linkage
  modified_base (20)..(20): 2' O-methyl modified a, c, u, g, or other
  misc_feature (20)..(21): Phosphorothioate linkage
  modified_base (21)..(21): 2' O-methyl modified a, c, u, g, or other
nnnnnnnnnnnnnnnnnnnnn

SEQ ID NO: 2454 - RNA, 21 nt, Artificial Sequence
  Description of Artificial Sequence: Synthetic oligonucleotide
  modified_base (1)..(1): 2' O-methyl modified a, c, u, g, or other
  misc_feature (1)..(2): Phosphorothioate linkage
  modified_base (2)..(2): 2' fluoro-modified a, c, u, g, or other
  misc_feature (2)..(3): Phosphorothioate linkage
  modified_base (3)..(3): 2' O-methyl modified a, c, u, g, or other
  modified_base (4)..(4): 2' O-methyl modified a, c, u, g, or other
  modified_base (5)..(5): 2' O-methyl modified a, c, u, g, or other
  modified_base (6)..(6): 2' fluoro-modified a, c, u, g, or other
  modified_base (7)..(7): 2' O-methyl modified a, c, u, g, or other
  modified_base (8)..(8): 2' fluoro-modified a, c, u, g, or other
  modified_base (9)..(9): 2' fluoro-modified a, c, u, g, or other
  modified_base (10)..(10): 2' O-methyl modified a, c, u, g, or other
  modified_base (11)..(11): 2' O-methyl modified a, c, u, g, or other
  modified_base (12)..(12): 2' O-methyl modified a, c, u, g, or other
  modified_base (13)..(13): 2' O-methyl modified a, c, u, g, or other
  modified_base (14)..(14): 2' fluoro-modified a, c, u, g, or other
  modified_base (15)..(15): 2' O-methyl modified a, c, u, g, or other
  modified_base (16)..(16): 2' fluoro-modified a, c, u, g, or other
  modified_base (17)..(17): 2' O-methyl modified a, c, u, g, or other
  modified_base (18)..(18): 2' O-methyl modified a, c, u, g, or other
  modified_base (19)..(19): 2' O-methyl modified a, c, u, g, or other
  misc_feature (19)..(20): Phosphorothioate linkage
  modified_base (20)..(20): 2' O-methyl modified a, c, u, g, or other
  misc_feature (20)..(21): Phosphorothioate linkage
  modified_base (21)..(21): 2' O-methyl modified a, c, u, g, or other
nnnnnnnnnnnnnnnnnnnnn

SEQ ID NO: 2455 - RNA, 21 nt, Artificial Sequence
  Description of Artificial Sequence: Synthetic oligonucleotide
  modified_base (1)..(1): 2' O-methyl modified a, c, u, g, or other
  misc_feature (1)..(2): Phosphorothioate linkage
  modified_base (2)..(2): 2' fluoro-modified a, c, u, g, or other
  misc_feature (2)..(3): Phosphorothioate linkage
  modified_base (3)..(3): 2' O-methyl modified a, c, u, g, or other
  modified_base (4)..(4): 2' O-methyl modified a, c, u, g, or other
  modified_base (5)..(5): 2' O-methyl modified a, c, u, g, or other
  modified_base (6)..(6): 2' fluoro-modified a, c, u, g, or other
  modified_base (7)..(7): 2' O-methyl modified a, c, u, g, or other
  modified_base (8)..(8): 2' O-methyl modified a, c, u, g, or other
  modified_base (9)..(9): 2' O-methyl modified a, c, u, g, or other
  modified_base (10)..(10): 2' O-methyl modified a, c, u, g, or other
  modified_base (11)..(11): 2' O-methyl modified a, c, u, g, or other
  modified_base (12)..(12): 2' O-methyl modified a, c, u, g, or other
  modified_base (13)..(13): 2' O-methyl modified a, c, u, g, or other
  modified_base (14)..(14): 2' fluoro-modified a, c, u, g, or other
  modified_base (15)..(15): 2' O-methyl modified a, c, u, g, or other
  modified_base (16)..(16): 2' fluoro-modified a, c, u, g, or other
  modified_base (17)..(17): 2' O-methyl modified a, c, u, g, or other
  modified_base (18)..(18): 2' O-methyl modified a, c, u, g, or other
  modified_base (19)..(19): 2' O-methyl modified a, c, u, g, or other
  misc_feature (19)..(20): Phosphorothioate linkage
  modified_base (20)..(20): 2' O-methyl modified a, c, u, g, or other
  misc_feature (20)..(21): Phosphorothioate linkage
  modified_base (21)..(21): 2' O-methyl modified a, c, u, g, or other
nnnnnnnnnnnnnnnnnnnnn

SEQ ID NO: 2456 - RNA, 21 nt, Artificial Sequence
  Description of Artificial Sequence: Synthetic oligonucleotide
  modified_base (1)..(1): 2' O-methyl modified a, c, u, g, or other
  misc_feature (1)..(2): Phosphorothioate linkage
  modified_base (2)..(2): 2' fluoro-modified a, c, u, g, or other
  misc_feature (2)..(3): Phosphorothioate linkage
  modified_base (3)..(3): 2' O-methyl modified a, c, u, g, or other
  modified_base (4)..(4): 2' fluoro-modified a, c, u, g, or other
  modified_base (5)..(5): 2' O-methyl modified a, c, u, g, or other
  modified_base (6)..(6): 2' fluoro-modified a, c, u, g, or other
  modified_base (7)..(7): 2' O-methyl modified a, c, u, g, or other
  modified_base (8)..(8): 2' O-methyl modified a, c, u, g, or other
  modified_base (9)..(9): 2' O-methyl modified a, c, u, g, or other
  modified_base (10)..(10): 2' O-methyl modified a, c, u, g, or other
  modified_base (11)..(11): 2' O-methyl modified a, c, u, g, or other
  modified_base (12)..(12): 2' O-methyl modified a, c, u, g, or other
  modified_base (13)..(13): 2' O-methyl modified a, c, u, g, or other
  modified_base (14)..(14): 2' fluoro-modified a, c, u, g, or other
  modified_base (15)..(15): 2' O-methyl modified a, c, u, g, or other
  modified_base (16)..(16): 2' fluoro-modified a, c, u, g, or other
  modified_base (17)..(17): 2' O-methyl modified a, c, u, g, or other
  modified_base (18)..(18): 2' O-methyl modified a, c, u, g, or other
  modified_base (19)..(19): 2' O-methyl modified a, c, u, g, or other
  misc_feature (19)..(20): Phosphorothioate linkage
  modified_base (20)..(20): 2' O-methyl modified a, c, u, g, or other
  misc_feature (20)..(21): Phosphorothioate linkage
  modified_base (21)..(21): 2' O-methyl modified a, c, u, g, or other
nnnnnnnnnnnnnnnnnnnnn

SEQ ID NO: 2457 - RNA, 21 nt, Artificial Sequence
  Description of Artificial Sequence: Synthetic oligonucleotide
  modified_base (1)..(1): 2' O-methyl modified a, c, u, g, or other
  misc_feature (1)..(2): Phosphorothioate linkage
  modified_base (2)..(2): 2' fluoro-modified a, c, u, g, or other
  misc_feature (2)..(3): Phosphorothioate linkage
  modified_base (3)..(3): 2' O-methyl modified a, c, u, g, or other
  modified_base (4)..(4): 2' O-methyl modified a, c, u, g, or other
  modified_base (5)..(5): 2' O-methyl modified a, c, u, g, or other
  modified_base (6)..(6): 2' O-methyl modified a, c, u, g, or other
  modified_base (7)..(7): 2' O-methyl modified a, c, u, g, or other
  modified_base (8)..(8): 2' O-methyl modified a, c, u, g, or other
  modified_base (9)..(9): 2' O-methyl modified a, c, u, g, or other
  modified_base (10)..(10): 2' O-methyl modified a, c, u, g, or other
  modified_base (11)..(11): 2' O-methyl modified a, c, u, g, or other
  modified_base (12)..(12): 2' O-methyl modified a, c, u, g, or other
  modified_base (13)..(13): 2' O-methyl modified a, c, u, g, or other
  modified_base (14)..(14): 2' fluoro-modified a, c, u, g, or other
  modified_base (15)..(15): 2' O-methyl modified a, c, u, g, or other
  modified_base (16)..(16): 2' fluoro-modified a, c, u, g, or other
  modified_base (17)..(17): 2' O-methyl modified a, c, u, g, or other
  modified_base (18)..(18): 2' O-methyl modified a, c, u, g, or other
  modified_base (19)..(19): 2' O-methyl modified a, c, u, g, or other
  misc_feature (19)..(20): Phosphorothioate linkage
  modified_base (20)..(20): 2' O-methyl modified a, c, u, g, or other
  misc_feature (20)..(21): Phosphorothioate linkage
  modified_base (21)..(21): 2' O-methyl modified a, c, u, g, or other
nnnnnnnnnnnnnnnnnnnnn

SEQ ID NO: 2458 - RNA, 21 nt, Artificial Sequence
  Description of Artificial Sequence: Synthetic oligonucleotide
  modified_base (1)..(1): 2' O-methyl modified a, c, u, g, or other
  misc_feature (1)..(2): Phosphorothioate linkage
  modified_base (2)..(2): 2' fluoro-modified a, c, u, g, or other
  misc_feature (2)..(3): Phosphorothioate linkage
  modified_base (3)..(3): 2' O-methyl modified a, c, u, g, or other
  modified_base (4)..(4): 2' O-methyl modified a, c, u, g, or other
  modified_base (5)..(5): 2' O-methyl modified a, c, u, g, or other
  modified_base (6)..(6): 2' fluoro-modified a, c, u, g, or other
  modified_base (7)..(7): 2' O-methyl modified a, c, u, g, or other
  modified_base (8)..(8): 2' O-methyl modified a, c, u, g, or other
  modified_base (9)..(9): 2' fluoro-modified a, c, u, g, or other
  modified_base (10)..(10): 2' O-methyl modified a, c, u, g, or other
  modified_base (11)..(11): 2' O-methyl modified a, c, u, g, or other
  modified_base (12)..(12): 2' O-methyl modified a, c, u, g, or other
  modified_base (13)..(13): 2' O-methyl modified a, c, u, g, or other
  modified_base (14)..(14): 2' fluoro-modified a, c, u, g, or other
  modified_base (15)..(15): 2' O-methyl modified a, c, u, g, or other
  modified_base (16)..(16): 2' fluoro-modified a, c, u, g, or other
  modified_base (17)..(17): 2' O-methyl modified a, c, u, g, or other
  modified_base (18)..(18): 2' O-methyl modified a, c, u, g, or other
  modified_base (19)..(19): 2' O-methyl modified a, c, u, g, or other
  misc_feature (19)..(20): Phosphorothioate linkage
  modified_base (20)..(20): 2' O-methyl modified a, c, u, g, or other
  misc_feature (20)..(21): Phosphorothioate linkage
  modified_base (21)..(21): 2' O-methyl modified a, c, u, g, or other
nnnnnnnnnnnnnnnnnnnnn

SEQ ID NO: 2459 - RNA, 21 nt, Artificial Sequence
  Description of Artificial Sequence: Synthetic oligonucleotide
  modified_base (1)..(1): 2' O-methyl modified a, c, u, g, or other
  misc_feature (1)..(2): Phosphorothioate linkage
  modified_base (2)..(2): 2' fluoro-modified a, c, u, g, or other
  misc_feature (2)..(3): Phosphorothioate linkage
  modified_base (3)..(3): 2' O-methyl modified a, c, u, g, or other
  modified_base (4)..(4): 2' fluoro-modified a, c, u, g, or other
  modified_base (5)..(5): 2' O-methyl modified a, c, u, g, or other
  modified_base (6)..(6): 2' fluoro-modified a, c, u, g, or other
  modified_base (7)..(7): 2' O-methyl modified a, c, u, g, or other
  modified_base (8)..(8): 2' fluoro-modified a, c, u, g, or other
  modified_base (9)..(9): 2' O-methyl modified a, c, u, g, or other
  modified_base (10)..(10): 2' fluoro-modified a, c, u, g, or other
  modified_base (11)..(11): 2' O-methyl modified a, c, u, g, or other
  modified_base (12)..(12): 2' fluoro-modified a, c, u, g, or other
  modified_base (13)..(13): 2' O-methyl modified a, c, u, g, or other
  modified_base (14)..(14): 2' fluoro-modified a, c, u, g, or other
  modified_base (15)..(15): 2' O-methyl modified a, c, u, g, or other
  modified_base (16)..(16): 2' fluoro-modified a, c, u, g, or other
  modified_base (17)..(17): 2' O-methyl modified a, c, u, g, or other
  modified_base (18)..(18): 2' fluoro-modified a, c, u, g, or other
  modified_base (19)..(19): 2' O-methyl modified a, c, u, g, or other
  misc_feature (19)..(20): Phosphorothioate linkage
  modified_base (20)..(20): 2' O-methyl modified a, c, u, g, or other
  misc_feature (20)..(21): Phosphorothioate linkage
  modified_base (21)..(21): 2' O-methyl modified a, c, u, g, or other
nnnnnnnnnnnnnnnnnnnnn

SEQ ID NO: 2460 - RNA, 21 nt, Artificial Sequence
  Description of Artificial Sequence: Synthetic oligonucleotide
  modified_base (1)..(1): 2' O-methyl modified a, c, u, g, or other
  misc_feature (1)..(2): Phosphorothioate linkage
  modified_base (2)..(2): 2' fluoro-modified a, c, u, g, or other
  misc_feature (2)..(3): Phosphorothioate linkage
  modified_base (3)..(3): 2' O-methyl modified a, c, u, g, or other
  modified_base (4)..(4): 2' O-methyl modified a, c, u, g, or other
  modified_base (5)..(5): 2' O-methyl modified a, c, u, g, or other
  modified_base (6)..(6): 2' O-methyl modified a, c, u, g, or other
  modified_base (7)..(7): 2' O-methyl modified a, c, u, g, or other
  modified_base (8)..(8): 2' O-methyl modified a, c, u, g, or other
  modified_base (9)..(9): 2' O-methyl modified a, c, u, g, or other
  modified_base (10)..(10): 2' O-methyl modified a, c, u, g, or other
  modified_base (11)..(11): 2' O-methyl modified a, c, u, g, or other
  modified_base (12)..(12): 2' O-methyl modified a, c, u, g, or other
  modified_base (13)..(13): 2' O-methyl modified a, c, u, g, or other
  modified_base (14)..(14): 2' fluoro-modified a, c, u, g, or other
  modified_base (15)..(15): 2' O-methyl modified a, c, u, g, or other
  modified_base (16)..(16): 2' O-methyl modified a, c, u, g, or other
  modified_base (17)..(17): 2' O-methyl modified a, c, u, g, or other
  modified_base (18)..(18): 2' O-methyl modified a, c, u, g, or other
  modified_base (19)..(19): 2' O-methyl modified a, c, u, g, or other
  misc_feature (19)..(20): Phosphorothioate linkage
  modified_base (20)..(20): 2' O-methyl modified a, c, u, g, or other
  misc_feature (20)..(21): Phosphorothioate linkage
  modified_base (21)..(21): 2' O-methyl modified a, c, u, g, or other
nnnnnnnnnnnnnnnnnnnnn

SEQ ID NO: 2461 - DNA, 20 bp, Artificial Sequence
  Description of Artificial Sequence: Synthetic oligonucleotide
  Description of Combined DNA/RNA Molecule: Synthetic oligonucleotide
  modified_base (1)..(1): 2' O-methyl modified a, c, u, g, or other
  misc_feature (1)..(2): Phosphorothioate linkage
  modified_base (2)..(2): 2' O-methyl modified a, c, u, g, or other
  misc_feature (2)..(3): Phosphorothioate linkage
  modified_base (3)..(3): 2' O-methyl modified a, c, u, g, or other
  misc_feature (3)..(4): Phosphorothioate linkage
  modified_base (4)..(4): 2' O-methyl modified a, c, u, g, or other
  misc_feature (4)..(5): Phosphorothioate linkage
  modified_base (5)..(5): 2' O-methyl modified a, c, u, g, or other
  misc_feature (5)..(6): Phosphorothioate linkage
  modified_base (6)..(6): 2' deoxy-modified a, c, u, t, g, or other
  misc_feature (6)..(7): Phosphorothioate linkage
  modified_base (7)..(7): 2' deoxy-modified a, c, u, t, g, or other
  misc_feature (7)..(8): Phosphorothioate linkage
  modified_base (8)..(8): 2' deoxy-modified a, c, u, t, g, or other
  misc_feature (8)..(9): Phosphorothioate linkage
  modified_base (9)..(9): 2' deoxy-modified a, c, u, t, g, or other
  misc_feature (9)..(10): Phosphorothioate linkage
  modified_base (10)..(10): 2' deoxy-modified a, c, u, t, g, or other
  misc_feature (10)..(11): Phosphorothioate linkage
  modified_base (11)..(11): 2' deoxy-modified a, c, u, t, g, or other
  misc_feature (11)..(12): Phosphorothioate linkage
  modified_base (12)..(12): 2' deoxy-modified a, c, u, t, g, or other
  misc_feature (12)..(13): Phosphorothioate linkage
  modified_base (13)..(13): 2' deoxy-modified a, c, u, t, g, or other
  misc_feature (13)..(14): Phosphorothioate linkage
  modified_base (14)..(14): 2' deoxy-modified a, c, u, t, g, or other
  misc_feature (14)..(15): Phosphorothioate linkage
  modified_base (15)..(15): 2' deoxy-modified a, c, u, t, g, or other
  misc_feature (15)..(16): Phosphorothioate linkage
  modified_base (16)..(16): 2' O-methyl modified a, c, u, g, or other
  misc_feature (16)..(17): Phosphorothioate linkage
  modified_base (17)..(17): 2' O-methyl modified a, c, u, g, or other
  misc_feature (17)..(18): Phosphorothioate linkage
  modified_base (18)..(18): 2' O-methyl modified a, c, u, g, or other
  misc_feature (18)..(19): Phosphorothioate linkage
  modified_base (19)..(19): 2' O-methyl modified a, c, u, g, or other
  misc_feature (19)..(20): Phosphorothioate linkage
  modified_base (20)..(20): 2' O-methyl modified a, c, u, g, or other
nnnnnnnnnnnnnnnnnnnn

SEQ ID NO: 2462 - DNA, 1146 bp, Homo sapiens; identical to SEQ ID NO: 2443

SEQ ID NO: 2463 - RNA, 21 nt, Artificial Sequence
  Description of Artificial Sequence: Synthetic oligonucleotide
ucgauacuuguauuuuucauu

SEQ ID NO: 2464 - RNA, 21 nt, Artificial Sequence
  Description of Artificial Sequence: Synthetic oligonucleotide
cuacaaaggugaacucagauu

SEQ ID NO: 2465 - RNA, 21 nt, Artificial Sequence
  Description of Artificial Sequence: Synthetic oligonucleotide
auggaagaaaagcagaacauu

SEQ ID NO: 2466 - RNA, 21 nt, Artificial Sequence
  Description of Artificial Sequence: Synthetic oligonucleotide
cuuucuacaaaggugaacauu

SEQ ID NO: 2467 - RNA, 21 nt, Artificial Sequence
  Description of Artificial Sequence: Synthetic oligonucleotide
ugaaaaauacaaguaucgauu

SEQ ID NO: 2468 - RNA, 21 nt, Artificial Sequence
  Description of Artificial Sequence: Synthetic oligonucleotide
ucugaguucaccuuuguaguu

SEQ ID NO: 2469 - RNA, 21 nt, Artificial Sequence
  Description of Artificial Sequence: Synthetic oligonucleotide
uguucugcuuuucuuccauuu

SEQ ID NO: 2470 - RNA, 21 nt, Artificial Sequence
  Description of Artificial Sequence: Synthetic oligonucleotide
uguucaccuuuguagaaaguu

SEQ ID NO: 2471 - RNA, 21 nt, Artificial Sequence
  Description of Artificial Sequence: Synthetic oligonucleotide
uacaaacucuguacuuccauu

SEQ ID NO: 2472 - RNA, 21 nt, Artificial Sequence
  Description of Artificial Sequence: Synthetic oligonucleotide
uguacuuccuggaaucgaauu

SEQ ID NO: 2473 - DNA, 21 bp, Artificial Sequence
  Description of Artificial Sequence: Synthetic oligonucleotide
  Description of Combined DNA/RNA Molecule: Synthetic oligonucleotide
uacuuccuggaaucgauaauu

SEQ ID NO: 2474 - RNA, 21 nt, Artificial Sequence
  Description of Artificial Sequence: Synthetic oligonucleotide
gaaucgauacuuguauuuauu

SEQ ID NO: 2475 - RNA, 21 nt, Artificial Sequence
  Description of Artificial Sequence: Synthetic oligonucleotide
uucuaguaccaaguuacgauu

SEQ ID NO: 2476 - RNA, 21 nt, Artificial Sequence
  Description of Artificial Sequence: Synthetic oligonucleotide
aguuacgugcaccaaauuauu

SEQ ID NO: 2477 - RNA, 21 nt, Artificial Sequence
  Description of Artificial Sequence: Synthetic oligonucleotide
uuacgugcaccaaauuauauu

SEQ ID NO: 2478 - RNA, 21 nt, Artificial Sequence
  Description of Artificial Sequence: Synthetic oligonucleotide
aaaaucuacuaaaaagucauu

SEQ ID NO: 2479 - RNA, 21 nt, Artificial Sequence
  Description of Artificial Sequence: Synthetic oligonucleotide
aucuacuaaaaagucucuauu

SEQ ID NO: 2480 - RNA, 21 nt, Artificial Sequence
  Description of Artificial Sequence: Synthetic oligonucleotide
cuagauauugggagaaacauu

SEQ ID NO: 2481 - RNA, 21 nt, Artificial Sequence
  Description of Artificial Sequence: Synthetic oligonucleotide
cauuggaucuucucauugauu

SEQ ID NO: 2482 - RNA, 21 nt, Artificial Sequence
  Description of Artificial Sequence: Synthetic oligonucleotide
uuggaucuucucauuggaauu

SEQ ID NO: 2483 - DNA, 21 bp, Artificial Sequence
  Description of Artificial Sequence: Synthetic oligonucleotide
  Description of Combined DNA/RNA Molecule: Synthetic oligonucleotide
auacagagtgguguuacgauu

SEQ ID NO: 2484 - RNA, 21 nt, Artificial Sequence
  Description of Artificial Sequence: Synthetic oligonucleotide
aguuuaaaguugccuaagauu

SEQ ID NO: 2485 - RNA, 21 nt, Artificial Sequence
  Description of Artificial Sequence: Synthetic oligonucleotide
uuuaaaguugccuaagaaauu

SEQ ID NO: 2486 - RNA, 21 nt, Artificial Sequence
  Description of Artificial Sequence: Synthetic oligonucleotide
uggauugcuuuuuagcaaauu

SEQ ID NO: 2487 - DNA, 21 bp, Artificial Sequence
  Description of Artificial Sequence: Synthetic oligonucleotide
  Description of Combined DNA/RNA Molecule: Synthetic oligonucleotide
aaauaaagtucucuuagcauu

SEQ ID NO: 2488 - RNA, 21 nt, Artificial Sequence
  Description of Artificial Sequence: Synthetic oligonucleotide
uggaaguacagaguuuguauu

SEQ ID NO: 2489 - RNA, 21 nt, Artificial Sequence
  Description of Artificial Sequence: Synthetic oligonucleotide
uucgauuccaggaaguacauu

SEQ ID NO: 2490 - RNA, 21 nt, Artificial Sequence
  Description of Artificial Sequence: Synthetic oligonucleotide
uuaucgauuccaggaaguauu

SEQ ID NO: 2491 - RNA, 21 nt, Artificial Sequence
  Description of Artificial Sequence: Synthetic oligonucleotide
uaaauacaaguaucgauucuu

SEQ ID NO: 2492 - RNA, 21 nt, Artificial Sequence
  Description of Artificial Sequence: Synthetic oligonucleotide
ucguaacuugguacuagaauu

SEQ ID NO: 2493 - RNA, 21 nt, Artificial Sequence
  Description of Artificial Sequence: Synthetic oligonucleotide
uaauuuggugcacguaacuuu

SEQ ID NO: 2494 - RNA, 21 nt, Artificial Sequence
  Description of Artificial Sequence: Synthetic oligonucleotide
uauaauuuggugcacguaauu

SEQ ID NO: 2495 - RNA, 21 nt, Artificial Sequence
  Description of Artificial Sequence: Synthetic oligonucleotide
ugacuuuuuaguagauuuuuu

SEQ ID NO: 2496 - RNA, 21 nt, Artificial Sequence
  Description of Artificial Sequence: Synthetic oligonucleotide
uagagacuuuuuaguagauuu

SEQ ID NO: 2497 - RNA, 21 nt, Artificial Sequence
  Description of Artificial Sequence: Synthetic oligonucleotide
uguuucucccaauaucuaguu

SEQ ID NO: 2498 - RNA, 21 nt, Artificial Sequence
  Description of Artificial Sequence: Synthetic oligonucleotide
ucaaugagaagauccaauguu

SEQ ID NO: 2499 - RNA, 21 nt, Artificial Sequence
  Description of Artificial Sequence: Synthetic oligonucleotide
uuccaaugagaagauccaauu

SEQ ID NO: 2500 - RNA, 21 nt, Artificial Sequence
  Description of Artificial Sequence: Synthetic oligonucleotide
ucguaacaccacucuguauuu

SEQ ID NO: 2501 - RNA, 21 nt, Artificial Sequence
  Description of Artificial Sequence: Synthetic oligonucleotide
ucuuaggcaacuuuaaacuuu

SEQ ID NO: 2502 - RNA, 21 nt, Artificial Sequence
  Description of Artificial Sequence: Synthetic oligonucleotide
uuucuuaggcaacuuuaaauu

SEQ ID NO: 2503 - RNA, 21 nt, Artificial Sequence
  Description of Artificial Sequence: Synthetic oligonucleotide
uuugcuaaaaagcaauccauu

SEQ ID NO: 2504 - RNA, 21 nt, Artificial Sequence
  Description of Artificial Sequence: Synthetic oligonucleotide
ugcuaagagaacuuuauuuuu

SEQ ID NO: 2505 - RNA, 21 nt, Artificial Sequence
  Description of Artificial Sequence: Synthetic oligonucleotide
guaucuccagaauguuauauu

SEQ ID NO: 2506 - RNA, 21 nt, Artificial Sequence
  Description of Artificial Sequence: Synthetic oligonucleotide
acuuccuggaaucgauacauu

SEQ ID NO: 2507 - RNA, 21 nt, Artificial Sequence
  Description of Artificial Sequence: Synthetic oligonucleotide
cuuccuggaaucgauacuauu

SEQ ID NO: 2508 - RNA, 21 nt, Artificial Sequence
  Description of Artificial Sequence: Synthetic oligonucleotide
cuggaaucgauacuuguaauu

SEQ ID NO: 2509 - RNA, 21 nt, Artificial Sequence
  Description of Artificial Sequence: Synthetic oligonucleotide
ggaaucgauacuuguauuauu

SEQ ID NO: 2510 - RNA, 21 nt, Artificial Sequence
  Description of Artificial Sequence: Synthetic oligonucleotide
gaugcuuucuacaaagguauu

SEQ ID NO: 2511 - RNA, 21 nt, Artificial Sequence
  Description of Artificial Sequence: Synthetic oligonucleotide
agaaaagcagaacggugaauu

SEQ ID NO: 2512 - DNA, 21 bp, Artificial Sequence
  Description of Artificial Sequence: Synthetic oligonucleotide
  Description of Combined DNA/RNA Molecule: Synthetic oligonucleotide
aagcagaacggugaaaguauu

SEQ ID NO: 2513 - RNA, 21 nt, Artificial Sequence
  Description of Artificial Sequence: Synthetic oligonucleotide
agugggagauacauuggaauu

SEQ ID NO: 2514 - RNA, 21 nt, Artificial Sequence
  Description of Artificial Sequence: Synthetic oligonucleotide
ugggagauacauuggaucauu

SEQ ID NO: 2515 - RNA, 21 nt, Artificial Sequence
  Description of Artificial Sequence: Synthetic oligonucleotide
uauaacauucuggagauacuu

SEQ ID NO: 2516 - RNA, 21 nt, Artificial Sequence
  Description of Artificial Sequence: Synthetic oligonucleotide
uguaucgauuccaggaaguuu

SEQ ID NO: 2517 - RNA, 21 nt, Artificial Sequence
  Description of Artificial Sequence: Synthetic oligonucleotide
uaguaucgauuccaggaaguu

SEQ ID NO: 2518 - RNA, 21 nt, Artificial Sequence
  Description of Artificial Sequence: Synthetic oligonucleotide
uuacaaguaucgauuccaguu

SEQ ID NO: 2519 - RNA, 21 nt, Artificial Sequence
  Description of Artificial Sequence: Synthetic oligonucleotide
uaauacaaguaucgauuccuu

SEQ ID NO: 2520 - RNA, 21 nt, Artificial Sequence
  Description of Artificial Sequence: Synthetic oligonucleotide
uaccuuuguagaaagcaucuu

SEQ ID NO: 2521 - RNA, 21 nt, Artificial Sequence
  Description of Artificial Sequence: Synthetic oligonucleotide
uucaccguucugcuuuucuuu

SEQ ID NO: 2522 - RNA, 21 nt, Artificial Sequence
  Description of Artificial Sequence: Synthetic oligonucleotide
uacuuucaccguucugcuuuu

SEQ ID NO: 2523 - RNA, 21 nt, Artificial Sequence
  Description of Artificial Sequence: Synthetic oligonucleotide
uuccaauguaucucccacuuu

SEQ ID NO: 2524 - RNA, 21 nt, Artificial Sequence
  Description of Artificial Sequence: Synthetic oligonucleotide
ugauccaauguaucucccauu

SEQ ID NO: 2525 - RNA, 21 nt, Artificial Sequence
  Description of Artificial Sequence: Synthetic oligonucleotide
  modified_base (1)..(1): 2' fluoro-modified a, c, u, g, or other
  misc_feature (1)..(2): Phosphorothioate linkage
  modified_base (2)..(2): 2' O-methyl modified a, c, u, g, or other
  misc_feature (2)..(3): Phosphorothioate linkage
  modified_base (3)..(3): 2' O-methyl modified a, c, u, g, or other
  modified_base (4)..(4): 2' O-methyl modified a, c, u, g, or other
  modified_base (5)..(5): 2' fluoro-modified a, c, u, g, or other
  modified_base (6)..(6): 2' O-methyl modified a, c, u, g, or other
  modified_base (7)..(7): 2' fluoro-modified a, c, u, g, or other
  modified_base (8)..(8): 2' O-methyl modified a, c, u, g, or other
  modified_base (9)..(9): 2' fluoro-modified a, c, u, g, or other
  modified_base (10)..(10): 2' O-methyl modified a, c, u, g, or other
  modified_base (11)..(11): 2' fluoro-modified a, c, u, g, or other
  modified_base (12)..(12): 2' O-methyl modified a, c, u, g, or other
  modified_base (13)..(13): 2' fluoro-modified a, c, u, g, or other
  modified_base (14)..(14): 2' O-methyl modified a, c, u, g, or other
  modified_base (15)..(15): 2' fluoro-modified a, c, u, g, or other
  modified_base (16)..(16): 2' O-methyl modified a, c, u, g, or other
  modified_base (17)..(17): 2' fluoro-modified a, c, u, g, or other
  modified_base (18)..(18): 2' O-methyl modified a, c, u, g, or other
  modified_base (19)..(19): 2' O-methyl modified a, c, u, g, or other
  misc_feature (19)..(20): Phosphorothioate linkage
  modified_base (20)..(20): 2' O-methyl modified a, c, u, g, or other
  misc_feature (20)..(21): Phosphorothioate linkage
  modified_base (21)..(21): 2' O-methyl modified a, c, u, g, or other
nnnnnnnnnnnnnnnnnnnnn

SEQ ID NO: 2526 - RNA, 21 nt, Artificial Sequence
  Description of Artificial Sequence: Synthetic oligonucleotide
  modified_base (1)..(1): 2' O-methyl modified a, c, u, g, or other
  misc_feature (1)..(2): Phosphorothioate linkage
  modified_base (2)..(2): 2' O-methyl modified a, c, u, g, or other
  misc_feature (2)..(3): Phosphorothioate linkage
  modified_base (3)..(3): 2' fluoro-modified a, c, u, g, or other
  modified_base (4)..(4): 2' O-methyl modified a, c, u, g, or other
  modified_base (5)..(5): 2' fluoro-modified a, c, u, g, or other
  modified_base (6)..(6): 2' O-methyl modified a, c, u, g, or other
  modified_base (7)..(7): 2' fluoro-modified a, c, u, g, or other
  modified_base (8)..(8): 2' O-methyl modified a, c, u, g, or other
  modified_base (9)..(9): 2' fluoro-modified a, c, u, g, or other
  modified_base (10)..(10): 2' O-methyl modified a, c, u, g, or other
  modified_base (11)..(11): 2' fluoro-modified a, c, u, g, or other
  modified_base (12)..(12): 2' O-methyl modified a, c, u, g, or other
  modified_base (13)..(13): 2' fluoro-modified a, c, u, g, or other
  modified_base (14)..(14): 2' O-methyl modified a, c, u, g, or other
  modified_base (15)..(15): 2' O-methyl modified a, c, u, g, or other
  modified_base (16)..(16): 2' O-methyl modified a, c, u, g, or other
  modified_base (17)..(17): 2' fluoro-modified a, c, u, g, or other
  modified_base (18)..(18): 2' O-methyl modified a, c, u, g, or other
  modified_base (19)..(19): 2' fluoro-modified a, c, u, g, or other
  misc_feature (19)..(20): Phosphorothioate linkage
  modified_base (20)..(20): 2' O-methyl modified a, c, u, g, or other
  misc_feature (20)..(21): Phosphorothioate linkage
  modified_base (21)..(21): 2' O-methyl modified a, c, u, g, or other
nnnnnnnnnnnnnnnnnnnnn

SEQ ID NO: 2527 - RNA, 21 nt, Artificial Sequence
  Description of Artificial Sequence: Synthetic oligonucleotide
  modified_base (1)..(1): 2' fluoro-modified a, c, u, g, or other
  misc_feature (1)..(2): Phosphorothioate linkage
  modified_base (2)..(2): 2' O-methyl modified a, c, u, g, or other
  misc_feature (2)..(3): Phosphorothioate linkage
  modified_base (3)..(3): 2' fluoro-modified a, c, u, g, or other
  modified_base (4)..(4): 2' O-methyl modified a, c, u, g, or other
  modified_base (5)..(5): 2' fluoro-modified a, c, u, g, or other
  modified_base (6)..(6): 2' O-methyl modified a, c, u, g, or other
  modified_base (7)..(7): 2' fluoro-modified a, c, u, g, or other
  modified_base (8)..(8): 2' O-methyl modified a, c, u, g, or other
  modified_base (9)..(9): 2' fluoro-modified a, c, u, g, or other
  modified_base (10)..(10): 2' O-methyl modified a, c, u, g, or other
  modified_base (11)..(11): 2' fluoro-modified a, c, u, g, or other
  modified_base (12)..(12): 2' O-methyl modified a, c, u, g, or other
  modified_base (13)..(13): 2' O-methyl modified a, c, u, g, or other
  modified_base (14)..(14): 2' O-methyl modified a, c, u, g, or other
  modified_base (15)..(15): 2' fluoro-modified a, c, u, g, or other
  modified_base (16)..(16): 2' O-methyl modified a, c, u, g, or other
  modified_base (17)..(17): 2' fluoro-modified a, c, u, g, or other
  modified_base (18)..(18): 2' O-methyl modified a, c, u, g, or other
  modified_base (19)..(19): 2' fluoro-modified a, c, u, g, or other
  misc_feature (19)..(20): Phosphorothioate linkage
  modified_base (20)..(20): 2' O-methyl modified a, c, u, g, or other
  misc_feature (20)..(21): Phosphorothioate linkage
  modified_base (21)..(21): 2' O-methyl modified a, c, u, g, or other
nnnnnnnnnnnnnnnnnnnnn

SEQ ID NO: 2528 - RNA, 21 nt, Artificial Sequence
  Description of Artificial Sequence: Synthetic oligonucleotide
  modified_base (1)..(1): 2' O-methyl modified a, c, u, g, or other
  misc_feature (1)..(2): Phosphorothioate linkage
  modified_base (2)..(2): 2' O-methyl modified a, c, u, g, or other
  misc_feature (2)..(3): Phosphorothioate linkage
  modified_base (3)..(3): 2' O-methyl modified a, c, u, g, or other
  modified_base (4)..(4): 2' O-methyl modified a, c, u, g, or other
  modified_base (5)..(5): 2' O-methyl modified a, c, u, g, or other
  modified_base (6)..(6): 2' O-methyl modified a, c, u, g, or other
  modified_base (7)..(7): 2' fluoro-modified a, c, u, g, or other
  modified_base (8)..(8): 2' O-methyl modified a, c, u, g, or other
  modified_base (9)..(9): 2' fluoro-modified a, c, u, g, or other
  modified_base (10)..(10): 2' O-methyl modified a, c, u, g, or other
  modified_base (11)..(11): 2' fluoro-modified a, c, u, g, or other
  modified_base (12)..(12): 2' O-methyl modified a, c, u, g, or other
  modified_base (13)..(13): 2' fluoro-modified a, c, u, g, or other
  modified_base (14)..(14): 2' O-methyl modified a, c, u, g, or other
  modified_base (15)..(15): 2' fluoro-modified a, c, u, g, or other
  modified_base (16)..(16): 2' O-methyl modified a, c, u, g, or other
  modified_base (17)..(17): 2' fluoro-modified a, c, u, g, or other
  modified_base (18)..(18): 2' O-methyl modified a, c, u, g, or other
  modified_base (19)..(19): 2' fluoro-modified a, c, u, g, or other
  misc_feature (19)..(20): Phosphorothioate linkage
  modified_base (20)..(20): 2' O-methyl modified a, c, u, g, or other
  misc_feature (20)..(21): Phosphorothioate linkage
  modified_base (21)..(21): 2' O-methyl modified a, c, u, g, or other
nnnnnnnnnnnnnnnnnnnnn

SEQ ID NO: 2529 - RNA, 21 nt, Artificial Sequence
  Description of Artificial Sequence: Synthetic oligonucleotide
  5' Phosphorothioate linkage
  modified_base (1)..(1): 2' O-methyl modified a, c, u, g, or other
  modified_base (2)..(2): 2' O-methyl modified a, c, u, g, or other
  modified_base (3)..(3): 2' O-methyl modified a, c, u, g, or other
  modified_base (4)..(4): 2' O-methyl modified a, c, u, g, or other
  modified_base (5)..(5): 2' O-methyl modified a, c, u, g, or other
  modified_base (6)..(6): 2' O-methyl modified a, c, u, g, or other
  modified_base (7)..(7): 2' fluoro-modified a, c, u, g, or other
  modified_base (8)..(8): 2' fluoro-modified a, c, u, g, or other
  modified_base (9)..(9): 2' fluoro-modified a, c, u, g, or other
  modified_base (10)..(10): 2' fluoro-modified a, c, u, g, or other
  modified_base (11)..(11): 2' O-methyl modified a, c, u, g, or other
  modified_base (12)..(12): 2' O-methyl modified a, c, u, g, or other
  modified_base (13)..(13): 2' O-methyl modified a, c, u, g, or other
  modified_base (14)..(14): 2' O-methyl modified a, c, u, g, or other
  modified_base (15)..(15): 2' O-methyl modified a, c, u, g, or other
  modified_base (16)..(16): 2' O-methyl modified a, c, u, g, or other
  modified_base (17)..(17): 2' O-methyl modified a, c, u, g, or other
  modified_base (18)..(18): 2' O-methyl modified a, c, u, g, or other
  modified_base (19)..(19): 2' O-methyl modified a, c, u, g, or other
  misc_feature (19)..(20): Phosphorothioate linkage
  modified_base (20)..(20): 2' O-methyl modified a, c, u, g, or other
  misc_feature (20)..(21): Phosphorothioate linkage
  modified_base (21)..(21): 2' O-methyl modified a, c, u, g, or other
nnnnnnnnnnnnnnnnnnnnn

SEQ ID NO: 2530 - RNA, 21 nt, Artificial Sequence
  Description of Artificial Sequence: Synthetic oligonucleotide
  5' Phosphorothioate linkage
  modified_base (1)..(1): 2' O-methyl modified a, c, u, g, or other
  modified_base (2)..(2): 2' O-methyl modified a, c, u, g, or other
  modified_base (3)..(3): 2' O-methyl modified a, c, u, g, or other
  modified_base (4)..(4): 2' O-methyl modified a, c, u, g, or other
  modified_base (5)..(5): 2' fluoro-modified a, c, u, g, or other
  modified_base (6)..(6): 2' fluoro-modified a, c, u, g, or other
  modified_base (7)..(7): 2' fluoro-modified a, c, u, g, or other
  modified_base (8)..(8): 2' fluoro-modified a, c, u, g, or other
  modified_base (9)..(9): 2' fluoro-modified a, c, u, g, or other
  modified_base (10)..(10): 2' O-methyl modified a, c, u, g, or other
  modified_base (11)..(11): 2' O-methyl modified a, c, u, g, or other
  modified_base (12)..(12): 2' O-methyl modified a, c, u, g, or other
  modified_base (13)..(13): 2' O-methyl modified a, c, u, g, or other
  modified_base (14)..(14): 2' O-methyl modified a, c, u, g, or other
  modified_base (15)..(15): 2' O-methyl modified a, c, u, g, or other
  modified_base (16)..(16): 2' O-methyl modified a, c, u, g, or other
  modified_base (17)..(17): 2' O-methyl modified a, c, u, g, or other
  modified_base (18)..(18): 2' O-methyl modified a, c, u, g, or other
  modified_base (19)..(19): 2' O-methyl modified a, c, u, g, or other
  misc_feature (19)..(20): Phosphorothioate linkage
  modified_base (20)..(20): 2' O-methyl modified a, c, u, g, or other
  misc_feature (20)..(21): Phosphorothioate linkage
  modified_base (21)..(21): 2' O-methyl modified a, c, u, g, or other
nnnnnnnnnnnnnnnnnnnnn

SEQ ID NO: 2531 - DNA, 21 bp, Artificial Sequence
  Description of Artificial Sequence: Synthetic oligonucleotide
  Description of Combined DNA/RNA Molecule: Synthetic oligonucleotide
  5' Phosphorothioate linkage
  modified_base (1)..(1): 2' O-methyl modified a, c, u, g, or other
  modified_base (2)..(2): 2' O-methyl modified a, c, u, g, or other
  modified_base (3)..(3): 2' O-methyl modified a, c, u, g, or other
  modified_base (4)..(4): 2' O-methyl modified a, c, u, g, or other
  modified_base (5)..(5): 2' fluoro-modified a, c, u, g, or other
  modified_base (6)..(6): 2' O-methyl modified a, c, u, g, or other
  modified_base (7)..(7): 2' fluoro-modified a, c, u, g, or other
  modified_base (8)..(8): 2' fluoro-modified a, c, u, g, or other
  modified_base (9)..(9): 2' deoxy-modified a, c, u, t, g, or other
  modified_base (10)..(10): 2' O-methyl modified a, c, u, g, or other
  modified_base (11)..(11): 2' O-methyl modified a, c, u, g, or other
  modified_base (12)..(12): 2' O-methyl modified a, c, u, g, or other
  modified_base (13)..(13): 2' O-methyl modified a, c, u, g, or other
  modified_base (14)..(14): 2' O-methyl modified a, c, u, g, or other
  modified_base (15)..(15): 2' O-methyl modified a, c, u, g, or other
  modified_base (16)..(16): 2' O-methyl modified a, c, u, g, or other
  modified_base (17)..(17): 2' O-methyl modified a, c, u, g, or other
  modified_base (18)..(18): 2' O-methyl modified a, c, u, g, or other
  modified_base (19)..(19): 2' O-methyl modified a, c, u, g, or other
  misc_feature (19)..(20): Phosphorothioate linkage
  modified_base (20)..(20): 2' O-methyl modified a, c, u, g, or other
  misc_feature (20)..(21): Phosphorothioate linkage
  modified_base (21)..(21): 2' O-methyl modified a, c, u, g, or other
nnnnnnnnnnnnnnnnnnnnn

SEQ ID NO: 2532 - RNA, 21 nt, Artificial Sequence
  Description of Artificial Sequence: Synthetic oligonucleotide
  5' Phosphorothioate linkage
  modified_base (1)..(1): 2' O-methyl modified a, c, u, g, or other
  modified_base (2)..(2): 2' O-methyl modified a, c, u, g, or other
  modified_base (3)..(3): 2' O-methyl modified a, c, u, g, or other
  modified_base (4)..(4): 2' O-methyl modified a, c, u, g, or other
  modified_base (5)..(5): 2' O-methyl modified a, c, u, g, or other
  modified_base (6)..(6): 2' fluoro-modified a, c, u, g, or other
  modified_base (7)..(7): 2' fluoro-modified a, c, u, g, or other
  modified_base (8)..(8): 2' O-methyl modified a, c, u, g, or other
  modified_base (9)..(9): 2' fluoro-modified a, c, u, g, or other
  modified_base (10)..(10): 2' O-methyl modified a, c, u, g, or other
  modified_base (11)..(11): 2' O-methyl modified a, c, u, g, or other
  modified_base (12)..(12): 2' O-methyl modified a, c, u, g, or other
  modified_base (13)..(13): 2' O-methyl modified a, c, u, g, or other
  modified_base (14)..(14): 2' O-methyl modified a, c, u, g, or other
  modified_base (15)..(15): 2' O-methyl modified a, c, u, g, or other
  modified_base (16)..(16): 2' O-methyl modified a, c, u, g, or other
  modified_base (17)..(17): 2' O-methyl modified a, c, u, g, or other
  modified_base (18)..(18): 2' O-methyl modified a, c, u, g, or other
  modified_base (19)..(19): 2' O-methyl modified a, c, u, g, or other
  misc_feature (19)..(20): Phosphorothioate linkage
  modified_base (20)..(20): 2' O-methyl modified a, c, u, g, or other
  misc_feature (20)..(21): Phosphorothioate linkage
  modified_base (21)..(21): 2' O-methyl modified a, c, u, g, or other
nnnnnnnnnnnnnnnnnnnnn

SEQ ID NO: 2533 - RNA, 21 nt, Artificial Sequence
  Description of Artificial Sequence: Synthetic oligonucleotide
  5' Phosphorothioate linkage
  modified_base (1)..(1): 2' O-methyl modified a, c, u, g, or other
  modified_base (2)..(2): 2' O-methyl modified a, c, u, g, or other
  modified_base (3)..(3): 2' O-methyl modified a, c, u, g, or other
  modified_base (4)..(4): 2' O-methyl modified a, c, u, g, or other
  modified_base (5)..(5): 2' O-methyl modified a, c, u, g, or other
  modified_base (6)..(6): 2' O-methyl modified a, c, u, g, or other
  modified_base (7)..(7): 2' fluoro-modified a, c, u, g, or other
  modified_base (8)..(8): 2' O-methyl modified a, c, u, g, or other
  modified_base (9)..(9): 2' fluoro-modified a, c, u, g, or other
  modified_base (10)..(10): 2' fluoro-modified a, c, u, g, or other
  modified_base (11)..(11): 2' O-methyl modified a, c, u, g, or other
  modified_base (12)..(12): 2' O-methyl modified a, c, u, g, or other
  modified_base (13)..(13): 2' O-methyl modified a, c, u, g, or other
  modified_base (14)..(14): 2' O-methyl modified a, c, u, g, or other
  modified_base (15)..(15): 2' O-methyl modified a, c, u, g, or other
  modified_base (16)..(16): 2' O-methyl modified a, c, u, g, or other
  modified_base (17)..(17): 2' O-methyl modified a, c, u, g, or other
  modified_base (18)..(18): 2' O-methyl modified a, c, u, g, or other
  modified_base (19)..(19): 2' O-methyl modified a, c, u, g, or other
  misc_feature (19)..(20): Phosphorothioate linkage
  modified_base (20)..(20): 2' O-methyl modified a, c, u, g, or other
  misc_feature (20)..(21): Phosphorothioate linkage
  modified_base (21)..(21): 2' O-methyl modified a, c, u, g, or other
nnnnnnnnnnnnnnnnnnnnn

SEQ ID NO: 2534 - RNA, 21 nt, Artificial Sequence
  Description of Artificial Sequence: Synthetic oligonucleotide
  5' Phosphorothioate linkage
  modified_base (1)..(1): 2' O-methyl modified a, c, u, g, or other
  modified_base (2)..(2): 2' O-methyl modified a, c, u, g, or other
  modified_base (3)..(3): 2' O-methyl modified a, c, u, g, or other
  modified_base (4)..(4): 2' O-methyl modified a, c, u, g, or other
  modified_base (5)..(5): 2' fluoro-modified a, c, u, g, or other
  modified_base (6)..(6): 2' O-methyl modified a, c, u, g, or other
  modified_base (7)..(7): 2' fluoro-modified a, c, u, g, or other
  modified_base (8)..(8): 2' O-methyl modified a, c, u, g, or other
  modified_base (9)..(9): 2' fluoro-modified a, c, u, g, or other
  modified_base (10)..(10): 2' O-methyl modified a, c, u, g, or other
  modified_base (11)..(11): 2' fluoro-modified a, c, u, g, or other
  modified_base (12)..(12): 2' O-methyl modified a, c, u, g, or other
  modified_base (13)..(13): 2' O-methyl modified a, c, u, g, or other
  modified_base (14)..(14): 2' O-methyl modified a, c, u, g, or other
  modified_base (15)..(15): 2' O-methyl modified a, c, u, g, or other
  modified_base (16)..(16): 2' O-methyl modified a, c, u, g, or other
  modified_base (17)..(17): 2' O-methyl modified a, c, u, g, or other
  modified_base (18)..(18): 2' O-methyl modified a, c, u, g, or other
  modified_base (19)..(19): 2' O-methyl modified a, c, u, g, or other
  misc_feature (19)..(20): Phosphorothioate linkage
  modified_base (20)..(20): 2' O-methyl modified a, c, u, g, or other
  misc_feature (20)..(21): Phosphorothioate linkage
  modified_base (21)..(21): 2' O-methyl modified a, c, u, g, or other
nnnnnnnnnnnnnnnnnnnnn

SEQ ID NO: 2535 - RNA, 21 nt, Artificial Sequence
  Description of Artificial Sequence: Synthetic oligonucleotide
  5' Phosphorothioate linkage
  modified_base (1)..(1): 2' O-methyl modified a, c, u, g, or other
  modified_base (2)..(2): 2' O-methyl modified a, c, u, g, or other
  modified_base (3)..(3): 2' O-methyl modified a, c, u, g, or other
  modified_base (4)..(4): 2' O-methyl modified a, c, u, g, or other
  modified_base (5)..(5): 2' fluoro-modified a, c, u, g, or other
  modified_base (6)..(6): 2' O-methyl modified a, c, u, g, or other
  modified_base (7)..(7): 2' fluoro-modified a, c, u, g, or other
  modified_base (8)..(8): 2' O-methyl modified a, c, u, g, or other
  modified_base (9)..(9): 2' fluoro-modified a, c, u, g, or other
  modified_base (10)..(10): 2' O-methyl modified a, c, u, g, or other
  modified_base (11)..(11): 2' O-methyl modified a, c, u, g, or other
  modified_base (12)..(12): 2' O-methyl modified a, c, u, g, or other
  modified_base (13)..(13): 2' O-methyl modified a, c, u, g, or other
  modified_base (14)..(14): 2' O-methyl modified a, c, u, g, or other
  modified_base (15)..(15): 2' O-methyl modified a, c, u, g, or other
  modified_base (16)..(16): 2' O-methyl modified a, c, u, g, or other
  modified_base (17)..(17): 2' O-methyl modified a, c, u, g, or other
  modified_base (18)..(18): 2' O-methyl modified a, c, u, g, or other
  modified_base (19)..(19): 2' O-methyl modified a, c, u, g, or other
  misc_feature (19)..(20): Phosphorothioate linkage
  modified_base (20)..(20): 2' O-methyl modified a, c, u, g, or other
  misc_feature (20)..(21): Phosphorothioate linkage
  modified_base (21)..(21): 2' O-methyl modified a, c, u, g, or other
nnnnnnnnnnnnnnnnnnnnn

SEQ ID NO: 2536 - RNA, 21 nt, Artificial Sequence
  Description of Artificial Sequence: Synthetic oligonucleotide
  5' Phosphorothioate linkage
  modified_base (1)..(1): 2' O-methyl modified a, c, u, g, or other
  modified_base (2)..(2): 2' O-methyl modified a, c, u, g, or other
  modified_base (3)..(3): 2' O-methyl modified a, c, u, g, or other
  modified_base (4)..(4): 2' O-methyl modified a, c, u, g, or other
  modified_base (5)..(5): 2' fluoro-modified a, c, u, g, or other
  modified_base (6)..(6): 2' fluoro-modified a, c, u, g, or other
  modified_base (7)..(7): 2' O-methyl modified a, c, u, g, or other
  modified_base (8)..(8): 2' O-methyl modified a, c, u, g, or other
  modified_base (9)..(9): 2' fluoro-modified a, c, u, g, or other
  modified_base (10)..(10): 2' fluoro-modified a, c, u, g, or other
  modified_base (11)..(11): 2' O-methyl modified a, c, u, g, or other
  modified_base (12)..(12): 2' O-methyl modified a, c, u, g, or other
  modified_base (13)..(13): 2' O-methyl modified a, c, u, g, or other
  modified_base (14)..(14): 2' O-methyl modified a, c, u, g, or other
  modified_base (15)..(15): 2' O-methyl modified a, c, u, g, or other
  modified_base (16)..(16): 2' O-methyl modified a, c, u, g, or other
  modified_base (17)..(17): 2' O-methyl modified a, c, u, g, or other
  modified_base (18)..(18): 2' O-methyl modified a, c, u, g, or other
  modified_base (19)..(19): 2' O-methyl modified a, c, u, g, or other
  misc_feature (19)..(20): Phosphorothioate linkage
  modified_base (20)..(20): 2' O-methyl modified a, c, u, g, or other
  misc_feature (20)..(21): Phosphorothioate linkage
  modified_base (21)..(21): 2' O-methyl modified a, c, u, g, or other
nnnnnnnnnnnnnnnnnnnnn

SEQ ID NO: 2537 - RNA, 21 nt, Artificial Sequence
  Description of Artificial Sequence: Synthetic oligonucleotide
  5' Phosphorothioate linkage
  modified_base (1)..(1): 2' O-methyl modified a, c, u, g, or other
  modified_base (2)..(2): 2' O-methyl modified a, c, u, g, or other
  modified_base (3)..(3): 2' O-methyl modified a, c, u, g, or other
  modified_base (4)..(4): 2' O-methyl modified a, c, u, g, or other
  modified_base (5)..(5): 2' fluoro-modified a, c, u, g, or other
  modified_base (6)..(6): 2' O-methyl modified a, c, u, g, or other
  modified_base (7)..(7): 2' O-methyl modified a, c, u, g, or other
  modified_base (8)..(8): 2' fluoro-modified a, c, u, g, or other
  modified_base (9)..(9): 2' fluoro-modified a, c, u, g, or other
  modified_base (10)..(10): 2' fluoro-modified a, c, u, g, or other
  modified_base (11)..(11): 2' fluoro-modified a, c, u, g, or other
  modified_base (12)..(12): 2' O-methyl modified a, c, u, g, or other
  modified_base (13)..(13): 2' O-methyl modified a, c, u, g, or other
  modified_base (14)..(14): 2' O-methyl modified a, c, u, g, or other
  modified_base (15)..(15): 2' O-methyl modified a, c, u, g, or other
  modified_base (16)..(16): 2' O-methyl modified a, c, u, g, or other
  modified_base (17)..(17): 2' O-methyl modified a, c, u, g, or other
  modified_base (18)..(18): 2' O-methyl modified a, c, u, g, or other
  modified_base (19)..(19): 2' O-methyl modified a, c, u, g, or other
  misc_feature (19)..(20): Phosphorothioate linkage
  modified_base (20)..(20): 2' O-methyl modified a, c, u, g, or other
  misc_feature (20)..(21): Phosphorothioate linkage
  modified_base (21)..(21): 2' O-methyl modified a, c, u, g, or other
nnnnnnnnnnnnnnnnnnnnn

SEQ ID NO: 2538 - RNA, 21 nt, Artificial Sequence
  Description of Artificial Sequence: Synthetic oligonucleotide
  5' Phosphorothioate linkage
  modified_base (1)..(1): 2' O-methyl modified a, c, u, g, or other
  modified_base (2)..(2): 2' O-methyl modified a, c, u, g, or other
  modified_base (3)..(3): 2' O-methyl modified a, c, u, g, or other
  modified_base (4)..(4): 2' O-methyl modified a, c, u, g, or other
  modified_base (5)..(5): 2' O-methyl modified a, c, u, g, or other
  modified_base (6)..(6): 2' fluoro-modified a, c, u, g, or other
  modified_base (7)..(7): 2' O-methyl modified a, c, u, g, or other
  modified_base (8)..(8): 2' fluoro-modified a, c, u, g, or other
  modified_base (9)..(9): 2' fluoro-modified a, c, u, g, or other
  modified_base (10)..(10): 2' O-methyl modified a, c, u, g, or other
  modified_base (11)..(11): 2' O-methyl modified a, c, u, g, or other
  modified_base (12)..(12): 2' O-methyl modified a, c, u, g, or other
  modified_base (13)..(13): 2' O-methyl modified a, c, u, g, or other
  modified_base (14)..(14): 2' O-methyl modified a, c, u, g, or other
  modified_base (15)..(15): 2' O-methyl modified a, c, u, g, or other
  modified_base (16)..(16): 2' O-methyl modified a, c, u, g, or other
  modified_base (17)..(17): 2' O-methyl modified a, c, u, g, or other
  modified_base (18)..(18): 2' O-methyl modified a, c, u, g, or other
  modified_base (19)..(19): 2' O-methyl modified a, c, u, g, or other
  misc_feature (19)..(20): Phosphorothioate linkage
  modified_base (20)..(20): 2' O-methyl modified a, c, u, g, or other
  misc_feature (20)..(21): Phosphorothioate linkage
  modified_base (21)..(21): 2' O-methyl modified a, c, u, g, or other
nnnnnnnnnnnnnnnnnnnnn

SEQ ID NO: 2539 - RNA, 21 nt, Artificial Sequence
  Description of Artificial Sequence: Synthetic oligonucleotide
  5' Phosphorothioate linkage
  modified_base (1)..(1): 2' O-methyl modified a, c, u, g, or other
  modified_base (2)..(2): 2' O-methyl modified a, c, u, g, or other
  modified_base (3)..(3): 2' O-methyl modified a, c, u, g, or other
  modified_base (4)..(4): 2' O-methyl modified a, c, u, g, or other
  modified_base (5)..(5): 2' O-methyl modified a, c, u, g, or other
  modified_base (6)..(6): 2' O-methyl modified a, c, u, g, or other
  modified_base (7)..(7): 2' O-methyl modified a, c, u, g, or other
  modified_base (8)..(8): 2' fluoro-modified a, c, u, g, or other
  modified_base (9)..(9): 2' fluoro-modified a, c, u, g, or other
  modified_base (10)..(10): 2' fluoro-modified a, c, u, g, or other
  modified_base (11)..(11): 2' fluoro-modified a, c, u, g, or other
  modified_base (12)..(12): 2' O-methyl modified a, c, u, g, or other
  modified_base (13)..(13): 2' O-methyl modified a, c, u, g, or other
  modified_base (14)..(14): 2' O-methyl modified a, c, u, g, or other
  modified_base (15)..(15): 2' O-methyl modified a, c, u, g, or other
  modified_base (16)..(16): 2' O-methyl modified a, c, u, g, or other
  modified_base (17)..(17): 2' O-methyl modified a, c, u, g, or other
  modified_base (18)..(18): 2' O-methyl modified a, c, u, g, or other
  modified_base (19)..(19): 2' O-methyl modified a, c, u, g, or other
  misc_feature (19)..(20): Phosphorothioate linkage
  modified_base (20)..(20): 2' O-methyl modified a, c, u, g, or other
  misc_feature (20)..(21): Phosphorothioate linkage
  modified_base (21)..(21): 2' O-methyl modified a, c, u, g, or other
nnnnnnnnnnnnnnnnnnnnn

SEQ ID NO: 2540 - RNA, 21 nt, Artificial Sequence
  Description of Artificial Sequence: Synthetic oligonucleotide
  5' Phosphorothioate linkage
  modified_base (1)..(1): 2' O-methyl modified a, c, u, g, or other
  modified_base (2)..(2): 2' O-methyl modified a, c, u, g, or other
  modified_base (3)..(3): 2' O-methyl modified a, c, u, g, or other
  modified_base (4)..(4): 2' O-methyl modified a, c, u, g, or other
  modified_base (5)..(5): 2' O-methyl modified a, c, u, g, or other
  modified_base (6)..(6): 2' fluoro-modified a, c, u, g, or other
  modified_base (7)..(7): 2' fluoro-modified a, c, u, g, or other
  modified_base (8)..(8): 2' fluoro-modified a, c, u, g, or other
  modified_base (9)..(9): 2' fluoro-modified a, c, u, g, or other
  modified_base (10)..(10): 2' fluoro-modified a, c, u, g, or other
  modified_base (11)..(11): 2' O-methyl modified a, c, u, g, or other
  modified_base (12)..(12): 2' O-methyl modified a, c, u, g, or other
  modified_base (13)..(13): 2' O-methyl modified a, c, u, g, or other
  modified_base (14)..(14): 2' O-methyl modified a, c, u, g, or other
  modified_base (15)..(15): 2' O-methyl modified a, c, u, g, or other
  modified_base (16)..(16): 2' O-methyl modified a, c, u, g, or other
  modified_base (17)..(17): 2' O-methyl modified a, c, u, g, or other
  modified_base (18)..(18): 2' O-methyl modified a, c, u, g, or other
  modified_base (19)..(19): 2' O-methyl modified a, c, u, g, or other
  misc_feature (19)..(20): Phosphorothioate linkage
  modified_base (20)..(20): 2' O-methyl modified a, c, u, g, or other
  misc_feature (20)..(21): Phosphorothioate linkage
  modified_base (21)..(21): 2' O-methyl modified a, c, u, g, or other
nnnnnnnnnnnnnnnnnnnnn

SEQ ID NO: 2541 - RNA, 21 nt, Artificial Sequence
  Description of Artificial Sequence: Synthetic oligonucleotide
  5' Phosphorothioate linkage
  modified_base (1)..(1): 2' O-methyl modified a, c, u, g, or other
  modified_base (2)..(2): 2' O-methyl modified a, c, u, g, or other
  modified_base (3)..(3): 2' O-methyl modified a, c, u, g, or other
  modified_base (4)..(4): 2' O-methyl modified a, c, u, g, or other
  modified_base (5)..(5): 2' O-methyl modified a, c, u, g, or other
  modified_base (6)..(6): 2' fluoro-modified a, c, u, g, or other
  modified_base (7)..(7): 2' fluoro-modified a, c, u, g, or other
  modified_base (8)..(8): 2' fluoro-modified a, c, u, g, or other
  modified_base (9)..(9): 2' fluoro-modified a, c, u, g, or other
  modified_base (10)..(10): 2' O-methyl modified a, c, u, g, or other
  modified_base (11)..(11): 2' O-methyl modified a, c, u, g, or other
  modified_base (12)..(12): 2' O-methyl modified a, c, u, g, or other
  modified_base (13)..(13): 2' O-methyl modified a, c, u, g, or other
  modified_base (14)..(14): 2' O-methyl modified a, c, u, g, or other
  modified_base (15)..(15): 2' O-methyl modified a, c, u, g, or other
  modified_base (16)..(16): 2' O-methyl modified a, c, u, g, or other
  modified_base (17)..(17): 2' O-methyl modified a, c, u, g, or other
  modified_base (18)..(18): 2' O-methyl modified a, c, u, g, or other
  modified_base (19)..(19): 2' O-methyl modified a, c, u, g, or other
  misc_feature (19)..(20): Phosphorothioate linkage
  modified_base (20)..(20): 2' O-methyl modified a, c, u, g, or other
  misc_feature (20)..(21): Phosphorothioate linkage
  modified_base (21)..(21): 2' O-methyl modified a, c, u, g, or other
nnnnnnnnnnnnnnnnnnnnn

SEQ ID NO: 2542 - RNA, 21 nt, Artificial Sequence
  Description of Artificial Sequence: Synthetic oligonucleotide
  5' Phosphorothioate linkage
  modified_base (1)..(1): 2' O-methyl modified a, c, u, g, or other
  modified_base (2)..(2): 2' O-methyl modified a, c, u, g, or other
  modified_base (3)..(3): 2' O-methyl modified a, c, u, g, or other
  modified_base (4)..(4): 2' O-methyl modified a, c, u, g, or other
  modified_base (5)..(5): 2' O-methyl modified a, c, u, g, or other
  modified_base (6)..(6): 2' O-methyl modified a, c, u, g, or other
  modified_base (7)..(7): 2' O-methyl modified a, c, u, g, or other
  modified_base (8)..(8): 2' fluoro-modified a, c, u, g, or other
  modified_base (9)..(9): 2' fluoro-modified a, c, u, g, or other
  modified_base (10)..(10): 2' O-methyl modified a, c, u, g, or other
  modified_base (11)..(11): 2' fluoro-modified a, c, u, g, or other
  modified_base (12)..(12): 2' O-methyl modified a, c, u, g, or other
  modified_base (13)..(13): 2' O-methyl modified a, c, u, g, or other
  modified_base (14)..(14): 2' O-methyl modified a, c, u, g, or other
  modified_base (15)..(15): 2' O-methyl modified a, c, u, g, or other
  modified_base (16)..(16): 2' O-methyl modified a, c, u, g, or other
  modified_base (17)..(17): 2' O-methyl modified a, c, u, g, or other
  modified_base (18)..(18): 2' O-methyl modified a, c, u, g, or other
  modified_base (19)..(19): 2' O-methyl modified a, c, u, g, or other
  misc_feature (19)..(20): Phosphorothioate linkage
  modified_base (20)..(20): 2' O-methyl modified a, c, u, g, or other
  misc_feature (20)..(21): Phosphorothioate linkage
  modified_base (21)..(21): 2' O-methyl modified a, c, u, g, or other
nnnnnnnnnnnnnnnnnnnnn

SEQ ID NO: 2543 - RNA, 21 nt, Artificial Sequence
  Description of Artificial Sequence: Synthetic oligonucleotide
  5' Phosphorothioate linkage
  modified_base (1)..(1): 2' O-methyl modified a, c, u, g, or other
  modified_base (2)..(2): 2' O-methyl modified a, c, u, g, or other
  modified_base (3)..(3): 2' O-methyl modified a, c, u, g, or other
  modified_base (4)..(4): 2' O-methyl modified a, c, u, g, or other
  modified_base (5)..(5): 2' fluoro-modified a, c, u, g, or other
  modified_base (6)..(6): 2' fluoro-modified a, c, u, g, or other
  modified_base (7)..(7): 2' O-methyl modified a, c, u, g, or other
  modified_base (8)..(8): 2' fluoro-modified a, c, u, g, or other
  modified_base (9)..(9): 2' fluoro-modified a, c, u, g, or other
  modified_base (10)..(10): 2' O-methyl modified a, c, u, g, or other
  modified_base (11)..(11): 2' fluoro-modified a, c, u, g, or other
  modified_base (12)..(12): 2' O-methyl modified a, c, u, g, or other
  modified_base (13)..(13): 2' O-methyl modified a, c, u, g, or other
  modified_base (14)..(14): 2' O-methyl modified a, c, u, g, or other
  modified_base (15)..(15): 2' O-methyl modified a, c, u, g, or other
  modified_base (16)..(16): 2' O-methyl modified a, c, u, g, or other
  modified_base (17)..(17): 2' O-methyl modified a, c, u, g, or other
  modified_base (18)..(18): 2' O-methyl modified a, c, u, g, or other
  modified_base (19)..(19): 2' O-methyl modified a, c, u, g, or other
  misc_feature (19)..(20): Phosphorothioate linkage
  modified_base (20)..(20): 2' O-methyl modified a, c, u, g, or other
  misc_feature (20)..(21): Phosphorothioate linkage
  modified_base (21)..(21): 2' O-methyl modified a, c, u, g, or other
nnnnnnnnnnnnnnnnnnnnn

SEQ ID NO: 2544 - RNA, 21 nt, Artificial Sequence
  Description of Artificial Sequence: Synthetic oligonucleotide
  5' Phosphorothioate linkage
  modified_base (1)..(1): 2' O-methyl modified a, c, u, g, or other
  modified_base (2)..(2): 2' O-methyl modified a, c, u, g, or other
  modified_base (3)..(3): 2' O-methyl modified a, c, u, g, or other
  modified_base (4)..(4): 2' O-methyl modified a, c, u, g, or other
  modified_base (5)..(5): 2' O-methyl modified a, c, u, g, or other
  modified_base (6)..(6): 2' O-methyl modified a, c, u, g, or other
  modified_base (7)..(7): 2' O-methyl modified a, c, u, g, or other
  modified_base (8)..(8): 2' O-methyl modified a, c, u, g, or other
  modified_base (9)..(9): 2' fluoro-modified a, c, u, g, or other
  modified_base (10)..(10): 2' O-methyl modified a, c, u, g, or other
  modified_base (11)..(11): 2' fluoro-modified a, c, u, g, or other
  modified_base (12)..(12): 2' O-methyl modified a, c, u, g, or other
  modified_base (13)..(13): 2' O-methyl modified a, c, u, g, or other
  modified_base (14)..(14): 2' O-methyl modified a, c, u, g, or other
  modified_base (15)..(15): 2' O-methyl modified a, c, u, g, or other
  modified_base (16)..(16): 2' O-methyl modified a, c, u, g, or other
  modified_base (17)..(17): 2' O-methyl modified a, c, u, g, or other
  modified_base (18)..(18): 2' O-methyl modified a, c, u, g, or other
  modified_base (19)..(19): 2' O-methyl modified a, c, u, g, or other
  misc_feature (19)..(20): Phosphorothioate linkage
  modified_base (20)..(20): 2' O-methyl modified a, c, u, g, or other
  misc_feature (20)..(21): Phosphorothioate linkage
  modified_base (21)..(21): 2' O-methyl modified a, c, u, g, or other
nnnnnnnnnnnnnnnnnnnnn

SEQ ID NO: 2545 - RNA, 21 nt, Artificial Sequence
  Description of Artificial Sequence: Synthetic oligonucleotide
  5' Phosphorothioate linkage
  modified_base (1)..(1): 2' O-methyl modified a, c, u, g, or other
  modified_base (2)..(2): 2' O-methyl modified a, c, u, g, or other
  modified_base (3)..(3): 2' O-methyl modified a, c, u, g, or other
  modified_base (4)..(4): 2' O-methyl modified a, c, u, g, or other
  modified_base (5)..(5): 2' fluoro-modified a, c, u, g, or other
  modified_base (6)..(6): 2' fluoro-modified a, c, u, g, or other
  modified_base (7)..(7): 2' O-methyl modified a, c, u, g, or other
  modified_base (8)..(8): 2' O-methyl modified a, c, u, g, or other
  modified_base (9)..(9): 2' fluoro-modified a, c, u, g, or other
  modified_base (10)..(10): 2' O-methyl modified a, c, u, g, or other
  modified_base (11)..(11): 2' fluoro-modified a, c, u, g, or other
  modified_base (12)..(12): 2' O-methyl modified a, c, u, g, or other
  modified_base (13)..(13): 2' O-methyl modified a, c, u, g, or other
  modified_base (14)..(14): 2' O-methyl modified a, c, u, g, or other
  modified_base (15)..(15): 2' O-methyl modified a, c, u, g, or other
  modified_base (16)..(16): 2' O-methyl modified a, c, u, g, or other
  modified_base (17)..(17): 2' O-methyl modified a, c, u, g, or other
  modified_base (18)..(18): 2' O-methyl modified a, c, u, g, or other
  modified_base (19)..(19): 2' O-methyl modified a, c, u, g, or other
  misc_feature (19)..(20): Phosphorothioate linkage
  modified_base (20)..(20): 2' O-methyl modified a, c, u, g, or other
  misc_feature (20)..(21): Phosphorothioate linkage
  modified_base (21)..(21): 2' O-methyl modified a, c, u, g, or other
nnnnnnnnnnnnnnnnnnnnn

SEQ ID NO: 2546 - RNA, 21 nt, Artificial Sequence
  Description of Artificial Sequence: Synthetic oligonucleotide
  5' Phosphorothioate linkage
  modified_base (1)..(1): 2' O-methyl modified a, c, u, g, or other
  modified_base (2)..(2): 2' O-methyl modified a, c, u, g, or other
  modified_base (3)..(3): 2' O-methyl modified a, c, u, g, or other
  modified_base (4)..(4): 2' O-methyl modified a, c, u, g, or other
  modified_base (5)..(5): 2' fluoro-modified a, c, u, g, or other
  modified_base (6)..(6): 2' fluoro-modified a, c, u, g, or other
  modified_base (7)..(7): 2' O-methyl modified a, c, u, g, or other
  modified_base (8)..(8): 2' fluoro-modified a, c, u, g, or other
  modified_base (9)..(9): 2' fluoro-modified a, c, u, g, or other
  modified_base (10)..(10): 2' O-methyl modified a, c, u, g, or other
  modified_base (11)..(11): 2' O-methyl modified a, c, u, g, or other
  modified_base (12)..(12): 2' O-methyl modified a, c, u, g, or other
  modified_base (13)..(13): 2' O-methyl modified a, c, u, g, or other
  modified_base (14)..(14): 2' O-methyl modified a, c, u, g, or other
  modified_base (15)..(15): 2' O-methyl modified a, c, u, g, or other
  modified_base (16)..(16): 2' O-methyl modified a, c, u, g, or other
  modified_base (17)..(17): 2' O-methyl modified a, c, u, g, or other
  modified_base (18)..(18): 2' O-methyl modified a, c, u, g, or other
  modified_base (19)..(19): 2' O-methyl modified a, c, u, g, or other
  misc_feature (19)..(20): Phosphorothioate linkage
  modified_base (20)..(20): 2' O-methyl modified a, c, u, g, or other
  misc_feature (20)..(21): Phosphorothioate linkage
  modified_base (21)..(21): 2' O-methyl modified a, c, u, g, or other
nnnnnnnnnnnnnnnnnnnnn

SEQ ID NO: 2547 - DNA, 21 bp, Artificial Sequence
  Description of Artificial Sequence: Synthetic oligonucleotide
  Description of Combined DNA/RNA Molecule: Synthetic oligonucleotide
  5' Phosphorothioate linkage
  modified_base (1)..(1): 2' O-methyl modified a, c, u, g, or other
  modified_base (2)..(2): 2' O-methyl modified a, c, u, g, or other
  modified_base (3)..(3): 2' O-methyl modified a, c, u, g, or other
  modified_base (4)..(4): 2' O-methyl modified a, c, u, g, or other
  modified_base (5)..(5): 2' O-methyl modified a, c, u, g, or other
  modified_base (6)..(6): 2' O-methyl modified a, c, u, g, or other
  modified_base (7)..(7): 2' fluoro-modified a, c, u, g, or other
  modified_base (8)..(8): 2' fluoro-modified a, c, u, g, or other
  modified_base (9)..(9): 2' deoxy-modified a, c, u, t, g, or other
  modified_base (10)..(10): 2' fluoro-modified a, c, u, g, or other
  modified_base (11)..(11): 2' O-methyl modified a, c, u, g, or other
  modified_base (12)..(12): 2' O-methyl modified a, c, u, g, or other
  modified_base (13)..(13): 2' O-methyl modified a, c, u, g, or other
  modified_base (14)..(14): 2' O-methyl modified a, c, u, g, or other
  modified_base (15)..(15): 2' O-methyl modified a, c, u, g, or other
  modified_base (16)..(16): 2' O-methyl modified a, c, u, g, or other
  modified_base (17)..(17): 2' O-methyl modified a, c, u, g, or other
  modified_base (18)..(18): 2' O-methyl modified a, c, u, g, or other
  modified_base (19)..(19): 2' O-methyl modified a, c, u, g, or other
  misc_feature (19)..(20): Phosphorothioate linkage
  modified_base (20)..(20): 2' O-methyl modified a, c, u, g, or other
  misc_feature (20)..(21): Phosphorothioate linkage
  modified_base (21)..(21): 2' O-methyl modified a, c, u, g, or other
nnnnnnnnnnnnnnnnnnnnn

SEQ ID NO: 2548 - RNA, 21 nt, Artificial Sequence
  Description of Artificial Sequence: Synthetic oligonucleotide
  modified_base (1)..(1): 2' O-methyl modified a, c, u, g, or other
  misc_feature (1)..(2): Phosphorothioate linkage
  modified_base (2)..(2): 2' fluoro-modified a, c, u, g, or other
  misc_feature (2)..(3): Phosphorothioate linkage
  modified_base (3)..(3): 2' O-methyl modified a, c, u, g, or other
  modified_base (4)..(4): 2' O-methyl modified a, c, u, g, or other
  modified_base (5)..(5): 2' O-methyl modified a, c, u, g, or other
  modified_base (6)..(6): 2' fluoro-modified a, c, u, g, or other
  modified_base (7)..(7): 2' O-methyl modified a, c, u, g, or other
  modified_base (8)..(8): 2' fluoro-modified a, c, u, g, or other
  modified_base (9)..(9): 2' O-methyl modified a, c, u, g, or other
  modified_base (10)..(10): 2' O-methyl modified a, c, u, g, or other
  modified_base (11)..(11): 2' O-methyl modified a, c, u, g, or other
  modified_base (12)..(12): 2' O-methyl modified a, c, u, g, or other
  modified_base (13)..(13): 2' O-methyl modified a, c, u, g, or other
  modified_base (14)..(14): 2' fluoro-modified a, c, u, g, or other
  modified_base (15)..(15): 2' O-methyl modified a, c, u, g, or other
  modified_base (16)..(16): 2' fluoro-modified a, c, u, g, or other
  modified_base (17)..(17): 2' O-methyl modified a, c, u, g, or other
  modified_base (18)..(18): 2' O-methyl modified a, c, u, g, or other
  modified_base (19)..(19): 2' O-methyl modified a, c, u, g, or other
  misc_feature (19)..(20): Phosphorothioate linkage
  modified_base (20)..(20): 2' O-methyl modified a, c, u, g, or other
  misc_feature (20)..(21): Phosphorothioate linkage
  modified_base (21)..(21): 2' O-methyl modified a, c, u, g, or other
nnnnnnnnnnnnnnnnnnnnn

SEQ ID NO: 2549 - RNA, 21 nt, Artificial Sequence
  Description of Artificial Sequence: Synthetic oligonucleotide
  modified_base (1)..(1): 2' O-methyl modified a, c, u, g, or other
  misc_feature (1)..(2): Phosphorothioate linkage
  modified_base (2)..(2): 2' fluoro-modified a, c, u, g, or other
  misc_feature (2)..(3): Phosphorothioate linkage
  modified_base (3)..(3): 2' O-methyl modified a, c, u, g, or other
  modified_base (4)..(4): 2' fluoro-modified a, c, u, g, or other
  misc_feature (4)..(5): Phosphorothioate linkage
  modified_base (5)..(5): 2' O-methyl modified a, c, u, g, or other
  modified_base (6)..(6): 2' fluoro-modified a, c, u, g, or other
  modified_base (7)..(7): 2' O-methyl modified a, c, u, g, or other
  modified_base (8)..(8): 2' fluoro-modified a, c, u, g, or other
  modified_base (9)..(9): 2' O-methyl modified a, c, u, g, or other
  modified_base (10)..(10): 2' fluoro-modified a, c, u, g, or other
  modified_base (11)..(11): 2' O-methyl modified a, c, u, g, or other
  modified_base (12)..(12): 2' fluoro-modified a, c, u, g, or other
  modified_base (13)..(13): 2' O-methyl modified a, c, u, g, or other
  modified_base (14)..(14): 2' fluoro-modified a, c, u, g, or other
  modified_base (15)..(15): 2' O-methyl modified a, c, u, g, or other
  modified_base (16)..(16): 2' fluoro-modified a, c, u, g, or other
  modified_base (17)..(17): 2' O-methyl modified a, c, u, g, or other
  modified_base (18)..(18): 2' fluoro-modified a, c, u, g, or other
  modified_base (19)..(19): 2' O-methyl modified a, c, u, g, or other
  misc_feature (19)..(20): Phosphorothioate linkage
  modified_base (20)..(20): 2' O-methyl modified a, c, u, g, or other
  misc_feature (20)..(21): Phosphorothioate linkage
  modified_base (21)..(21): 2' O-methyl modified a, c, u, g, or other
nnnnnnnnnnnnnnnnnnnnn

SEQ ID NO: 2550 - RNA, 21 nt, Artificial Sequence
  Description of Artificial Sequence: Synthetic oligonucleotide
ucgauacuuguauuuuucauu

SEQ ID NO: 2551 - RNA, 21 nt, Artificial Sequence
  Description of Artificial Sequence: Synthetic oligonucleotide
cuacaaaggugaacucagauu

SEQ ID NO: 2552 - RNA, 21 nt, Artificial Sequence
  Description of Artificial Sequence: Synthetic oligonucleotide
auggaagaaaagcagaacauu

SEQ ID NO: 2553 - RNA, 21 nt, Artificial Sequence
  Description of Artificial Sequence: Synthetic oligonucleotide
cuuucuacaaaggugaacauu

SEQ ID NO: 2554 - RNA, 19 nt, Artificial Sequence
  Description of Artificial Sequence: Synthetic oligonucleotide
ucgauacuuguauuuuuca

SEQ ID NO: 2555 - RNA, 19 nt, Artificial Sequence
  Description of Artificial Sequence: Synthetic oligonucleotide
cuacaaaggugaacucaga

SEQ ID NO: 2556 - RNA, 19 nt, Artificial Sequence
  Description of Artificial Sequence: Synthetic oligonucleotide
auggaagaaaagcagaaca

SEQ ID NO: 2557 - RNA, 19 nt, Artificial Sequence
  Description of Artificial Sequence: Synthetic oligonucleotide
cuuucuacaaaggugaaca

SEQ ID NO: 2558 - RNA, 21 nt, Artificial Sequence
  Description of Artificial Sequence: Synthetic oligonucleotide
uacaaacucuguacuuccauu

SEQ ID NO: 2559 - RNA, 21 nt, Artificial Sequence
  Description of Artificial Sequence: Synthetic oligonucleotide
uguacuuccuggaaucgaauu

SEQ ID NO: 2560 - RNA, 21 nt, Artificial Sequence
  Description of Artificial Sequence: Synthetic oligonucleotide
uacuuccuggaaucgauaauu

SEQ ID NO: 2561 - RNA, 21 nt, Artificial Sequence
  Description of Artificial Sequence: Synthetic oligonucleotide
gaaucgauacuuguauuuauu

SEQ ID NO: 2562 - RNA, 21 nt, Artificial Sequence
  Description of Artificial Sequence: Synthetic oligonucleotide
uucuaguaccaaguuacgauu

SEQ ID NO: 2563 - RNA, 21 nt, Artificial Sequence
  Description of Artificial Sequence: Synthetic oligonucleotide
aguuacgugcaccaaauuauu

SEQ ID NO: 2564 - RNA, 21 nt, Artificial Sequence
  Description of Artificial Sequence: Synthetic oligonucleotide
uuacgugcaccaaauuauauu

SEQ ID NO: 2565 - RNA, 21 nt, Artificial Sequence
  Description of Artificial Sequence: Synthetic oligonucleotide
aaaaucuacuaaaaagucauu

SEQ ID NO: 2566 - RNA, 21 nt, Artificial Sequence
  Description of Artificial Sequence: Synthetic oligonucleotide
aucuacuaaaaagucucuauu

SEQ ID NO: 2567 - RNA, 21 nt, Artificial Sequence
  Description of Artificial Sequence: Synthetic oligonucleotide
cuagauauugggagaaacauu

SEQ ID NO: 2568 - RNA, 21 nt, Artificial Sequence
  Description of Artificial Sequence: Synthetic oligonucleotide
cauuggaucuucucauugauu

SEQ ID NO: 2569 - RNA, 21 nt, Artificial Sequence
  Description of Artificial Sequence: Synthetic oligonucleotide
uuggaucuucucauuggaauu

SEQ ID NO: 2570 - DNA, 21 bp, Artificial Sequence
  Description of Artificial Sequence: Synthetic oligonucleotide
  Description of Combined DNA/RNA Molecule: Synthetic oligonucleotide
auacagagtgguguuacgauu

SEQ ID NO: 2571 - RNA, 21 nt, Artificial Sequence
  Description of Artificial Sequence: Synthetic oligonucleotide
aguuuaaaguugccuaagauu

SEQ ID NO: 2572 - RNA, 21 nt, Artificial Sequence
  Description of Artificial Sequence: Synthetic oligonucleotide
uuuaaaguugccuaagaaauu

SEQ ID NO: 2573 - RNA, 21 nt, Artificial Sequence
  Description of Artificial Sequence: Synthetic oligonucleotide
uggauugcuuuuuagcaaauu

SEQ ID NO: 2574 - DNA, 21 bp, Artificial Sequence
  Description of Artificial Sequence: Synthetic oligonucleotide
  Description of Combined DNA/RNA Molecule: Synthetic oligonucleotide
aaauaaagtucucuuagcauu

SEQ ID NO: 2575 - RNA, 19 nt, Artificial Sequence
  Description of Artificial Sequence: Synthetic oligonucleotide
uacaaacucuguacuucca

SEQ ID NO: 2576 - RNA, 19 nt, Artificial Sequence
  Description of Artificial Sequence: Synthetic oligonucleotide
uguacuuccuggaaucgaa

SEQ ID NO: 2577 - RNA, 19 nt, Artificial Sequence
  Description of Artificial Sequence: Synthetic oligonucleotide
uacuuccuggaaucgauaa

SEQ ID NO: 2578 - RNA, 19 nt, Artificial Sequence
  Description of Artificial Sequence: Synthetic oligonucleotide
gaaucgauacuuguauuua

SEQ ID NO: 2579 - RNA, 19 nt, Artificial Sequence
  Description of Artificial Sequence: Synthetic oligonucleotide
uucuaguaccaaguuacga

SEQ ID NO: 2580 - RNA, 19 nt, Artificial Sequence
  Description of Artificial Sequence: Synthetic oligonucleotide
aguuacgugcaccaaauua

SEQ ID NO: 2581 - RNA, 19 nt, Artificial Sequence
  Description of Artificial Sequence: Synthetic oligonucleotide
uuacgugcaccaaauuaua

SEQ ID NO: 2582 - RNA, 19 nt, Artificial Sequence
  Description of Artificial Sequence: Synthetic oligonucleotide
aaaaucuacuaaaaaguca

SEQ ID NO: 2583 - RNA, 19 nt, Artificial Sequence
  Description of Artificial Sequence: Synthetic oligonucleotide
aucuacuaaaaagucucua

SEQ ID NO: 2584 - RNA, 19 nt, Artificial Sequence
  Description of Artificial Sequence: Synthetic oligonucleotide
cuagauauugggagaaaca

SEQ ID NO: 2585 - RNA, 19 nt, Artificial Sequence
  Description of Artificial Sequence: Synthetic oligonucleotide
cauuggaucuucucauuga

SEQ ID NO: 2586 - RNA, 19 nt, Artificial Sequence
  Description of Artificial Sequence: Synthetic oligonucleotide
uuggaucuucucauuggaa

SEQ ID NO: 2587 - DNA, 19 bp, Artificial Sequence
  Description of Artificial Sequence: Synthetic oligonucleotide
  Description of Combined DNA/RNA Molecule: Synthetic oligonucleotide
auacagagtgguguuacga

SEQ ID NO: 2588 - RNA, 19 nt, Artificial Sequence
  Description of Artificial Sequence: Synthetic oligonucleotide
aguuuaaaguugccuaaga

SEQ ID NO: 2589 - RNA, 19 nt, Artificial Sequence
  Description of Artificial Sequence: Synthetic oligonucleotide
uuuaaaguugccuaagaaa

SEQ ID NO: 2590 - RNA, 19 nt, Artificial Sequence
  Description of Artificial Sequence: Synthetic oligonucleotide
uggauugcuuuuuagcaaa

SEQ ID NO: 2591 - DNA, 19 bp, Artificial Sequence
  Description of Artificial Sequence: Synthetic oligonucleotide
  Description of Combined DNA/RNA Molecule: Synthetic oligonucleotide
aaauaaagtucucuuagca

SEQ ID NO: 2592 - RNA, 21 nt, Artificial Sequence
  Description of Artificial Sequence: Synthetic oligonucleotide
guaucuccagaauguuauauu

SEQ ID NO: 2593 - RNA, 21 nt, Artificial Sequence
  Description of Artificial Sequence: Synthetic oligonucleotide
acuuccuggaaucgauacauu

SEQ ID NO: 2594 - RNA, 21 nt, Artificial Sequence
  Description of Artificial Sequence: Synthetic oligonucleotide
cuuccuggaaucgauacuauu

SEQ ID NO: 2595 - RNA, 21 nt, Artificial Sequence
  Description of Artificial Sequence: Synthetic oligonucleotide
cuggaaucgauacuuguaauu

SEQ ID NO: 2596 - RNA, 21 nt, Artificial Sequence
  Description of Artificial Sequence: Synthetic oligonucleotide
ggaaucgauacuuguauuauu

SEQ ID NO: 2597 - RNA, 21 nt, Artificial Sequence
  Description of Artificial Sequence: Synthetic oligonucleotide
gaugcuuucuacaaagguauu

SEQ ID NO: 2598 - RNA, 21 nt, Artificial Sequence
  Description of Artificial Sequence: Synthetic oligonucleotide
agaaaagcagaacggugaauu

SEQ ID NO: 2599 - RNA, 21 nt, Artificial Sequence
  Description of Artificial Sequence: Synthetic oligonucleotide
aagcagaacggugaaaguauu

SEQ ID NO: 2600 - RNA, 21 nt, Artificial Sequence
  Description of Artificial Sequence: Synthetic oligonucleotide
agugggagauacauuggaauu

SEQ ID NO: 2601 - RNA, 21 nt, Artificial Sequence
  Description of Artificial Sequence: Synthetic oligonucleotide
ugggagauacauuggaucauu

SEQ ID NO: 2602 - RNA, 19 nt, Artificial Sequence
  Description of Artificial Sequence: Synthetic oligonucleotide
guaucuccagaauguuaua

SEQ ID NO: 2603 - RNA, 19 nt, Artificial Sequence
  Description of Artificial Sequence: Synthetic oligonucleotide
acuuccuggaaucgauaca

SEQ ID NO: 2604 - RNA, 19 nt, Artificial Sequence
  Description of Artificial Sequence: Synthetic oligonucleotide
cuuccuggaaucgauacua

SEQ ID NO: 2605 - RNA, 19 nt, Artificial Sequence
  Description of Artificial Sequence: Synthetic oligonucleotide
cuggaaucgauacuuguaa

SEQ ID NO: 2606 - RNA, 19 nt, Artificial Sequence
  Description of Artificial Sequence: Synthetic oligonucleotide
ggaaucgauacuuguauua

SEQ ID NO: 2607 - RNA, 19 nt, Artificial Sequence
  Description of Artificial Sequence: Synthetic oligonucleotide
gaugcuuucuacaaaggua

SEQ ID NO: 2608 - RNA, 19 nt, Artificial Sequence
  Description of Artificial Sequence: Synthetic oligonucleotide
agaaaagcagaacggugaa

SEQ ID NO: 2609 - RNA, 19 nt, Artificial Sequence
  Description of Artificial Sequence: Synthetic oligonucleotide
aagcagaacggugaaagua

SEQ ID NO: 2610 - RNA, 19 nt, Artificial Sequence
  Description of Artificial Sequence: Synthetic oligonucleotide
agugggagauacauuggaa

SEQ ID NO: 2611 - RNA, 19 nt, Artificial Sequence
  Description of Artificial Sequence: Synthetic oligonucleotide
ugggagauacauuggauca

SEQ ID NO: 2612 - RNA, 21 nt, Artificial Sequence
  Description of Artificial Sequence: Synthetic oligonucleotide
ugaaaaauacaaguaucgauu

SEQ ID NO: 2613 - RNA, 21 nt, Artificial Sequence
  Description of Artificial Sequence: Synthetic oligonucleotide
ucugaguucaccuuuguaguu

SEQ ID NO: 2614 - RNA, 21 nt, Artificial Sequence
  Description of Artificial Sequence: Synthetic oligonucleotide
uguucugcuuuucuuccauuu

SEQ ID NO: 2615 - RNA, 21 nt, Artificial Sequence
  Description of Artificial Sequence: Synthetic oligonucleotide
uguucaccuuuguagaaaguu

SEQ ID NO: 2616 - RNA, 19 nt, Artificial Sequence
  Description of Artificial Sequence: Synthetic oligonucleotide
ugaaaaauacaaguaucga

SEQ ID NO: 2617 - RNA, 19 nt, Artificial Sequence
  Description of Artificial Sequence: Synthetic oligonucleotide
ucugaguucaccuuuguag

SEQ ID NO: 2618 - RNA, 19 nt, Artificial Sequence
  Description of Artificial Sequence: Synthetic oligonucleotide
uguucugcuuuucuuccau

SEQ ID NO: 2619 - RNA, 19 nt, Artificial Sequence
  Description of Artificial Sequence: Synthetic oligonucleotide
uguucaccuuuguagaaag

SEQ ID NO: 2620 - RNA, 21 nt, Artificial Sequence
  Description of Artificial Sequence: Synthetic oligonucleotide
uggaaguacagaguuuguauu

SEQ ID NO: 2621 - RNA, 21 nt, Artificial Sequence
  Description of Artificial Sequence: Synthetic oligonucleotide
uucgauuccaggaaguacauu

SEQ ID NO: 2622 - RNA, 21 nt, Artificial Sequence
  Description of Artificial Sequence: Synthetic oligonucleotide
uuaucgauuccaggaaguauu

SEQ ID NO: 2623 - RNA, 21 nt, Artificial Sequence
  Description of Artificial Sequence: Synthetic oligonucleotide
uaaauacaaguaucgauucuu

SEQ ID NO: 2624 - RNA, 21 nt, Artificial Sequence
  Description of Artificial Sequence: Synthetic oligonucleotide
ucguaacuugguacuagaauu

SEQ ID NO: 2625 - RNA, 21 nt, Artificial Sequence
  Description of Artificial Sequence: Synthetic oligonucleotide
uaauuuggugcacguaacuuu

SEQ ID NO: 2626 - RNA, 21 nt, Artificial Sequence
  Description of Artificial Sequence: Synthetic oligonucleotide
uauaauuuggugcacguaauu

SEQ ID NO: 2627 - RNA, 21 nt, Artificial Sequence
  Description of Artificial Sequence: Synthetic oligonucleotide
ugacuuuuuaguagauuuuuu

SEQ ID NO: 2628 - RNA, 21 nt, Artificial Sequence
  Description of Artificial Sequence: Synthetic oligonucleotide
uagagacuuuuuaguagauuu

SEQ ID NO: 2629 - RNA, 21 nt, Artificial Sequence
  Description of Artificial Sequence: Synthetic oligonucleotide
uguuucucccaauaucuaguu

SEQ ID NO: 2630 - RNA, 21 nt, Artificial Sequence
  Description of Artificial Sequence: Synthetic oligonucleotide
ucaaugagaagauccaauguu

SEQ ID NO: 2631 - RNA, 21 nt, Artificial Sequence
  Description of Artificial Sequence: Synthetic oligonucleotide
uuccaaugagaagauccaauu

SEQ ID NO: 2632 - RNA, 21 nt, Artificial Sequence
  Description of Artificial Sequence: Synthetic oligonucleotide
ucguaacaccacucuguauuu

SEQ ID NO: 2633 - RNA, 21 nt, Artificial Sequence
  Description of Artificial Sequence: Synthetic oligonucleotide
ucuuaggcaacuuuaaacuuu

SEQ ID NO: 2634 - RNA, 21 nt, Artificial Sequence
  Description of Artificial Sequence: Synthetic oligonucleotide
uuucuuaggcaacuuuaaauu

SEQ ID NO: 2635 - RNA, 21 nt, Artificial Sequence
  Description of Artificial Sequence: Synthetic oligonucleotide
uuugcuaaaaagcaauccauu

SEQ ID NO: 2636 - RNA, 21 nt, Artificial Sequence
  Description of Artificial Sequence: Synthetic oligonucleotide
ugcuaagagaacuuuauuuuu

SEQ ID NO: 2637 - RNA, 19 nt, Artificial Sequence
  Description of Artificial Sequence: Synthetic oligonucleotide
uggaaguacagaguuugua

SEQ ID NO: 2638 - RNA, 19 nt, Artificial Sequence
  Description of Artificial Sequence: Synthetic oligonucleotide
uucgauuccaggaaguaca

SEQ ID NO: 2639 - RNA, 19 nt, Artificial Sequence
  Description of Artificial Sequence: Synthetic oligonucleotide
uuaucgauuccaggaagua

SEQ ID NO: 2640 - RNA, 19 nt, Artificial Sequence
  Description of Artificial Sequence: Synthetic oligonucleotide
uaaauacaaguaucgauuc

SEQ ID NO: 2641 - RNA, 19 nt, Artificial Sequence
  Description of Artificial Sequence: Synthetic oligonucleotide
ucguaacuugguacuagaa

SEQ ID NO: 2642 - RNA, 19 nt, Artificial Sequence
  Description of Artificial Sequence: Synthetic oligonucleotide
uaauuuggugcacguaacu

SEQ ID NO: 2643 - RNA, 19 nt, Artificial Sequence
  Description of Artificial Sequence: Synthetic oligonucleotide
uauaauuuggugcacguaa

SEQ ID NO: 2644 - RNA, 19 nt, Artificial Sequence
  Description of Artificial Sequence: Synthetic oligonucleotide
ugacuuuuuaguagauuuu

SEQ ID NO: 2645 - RNA, 19 nt, Artificial Sequence
  Description of Artificial Sequence: Synthetic oligonucleotide
uagagacuuuuuaguagau

SEQ ID NO: 2646 - RNA, 19 nt, Artificial Sequence
  Description of Artificial Sequence: Synthetic oligonucleotide
uguuucucccaauaucuag

SEQ ID NO: 2647 - RNA, 19 nt, Artificial Sequence
  Description of Artificial Sequence: Synthetic oligonucleotide
ucaaugagaagauccaaug

SEQ ID NO: 2648 - RNA, 19 nt, Artificial Sequence
  Description of Artificial Sequence: Synthetic oligonucleotide
uuccaaugagaagauccaa

SEQ ID NO: 2649 - RNA, 19 nt, Artificial Sequence
  Description of Artificial Sequence: Synthetic oligonucleotide
ucguaacaccacucuguau

SEQ ID NO: 2650 - RNA, 19 nt, Artificial Sequence
  Description of Artificial Sequence: Synthetic oligonucleotide
ucuuaggcaacuuuaaacu

SEQ ID NO: 2651 - RNA, 19 nt, Artificial Sequence
  Description of Artificial Sequence: Synthetic oligonucleotide
uuucuuaggcaacuuuaaa

SEQ ID NO: 2652 - RNA, 19 nt, Artificial Sequence
  Description of Artificial Sequence: Synthetic oligonucleotide
uuugcuaaaaagcaaucca

SEQ ID NO: 2653 - RNA, 19 nt, Artificial Sequence
  Description of Artificial Sequence: Synthetic oligonucleotide
ugcuaagagaacuuuauuu

SEQ ID NO: 2654 - RNA, 21 nt, Artificial Sequence
  Description of Artificial Sequence: Synthetic oligonucleotide
uauaacauucuggagauacuu

SEQ ID NO: 2655 - RNA, 21 nt, Artificial Sequence
  Description of Artificial Sequence: Synthetic oligonucleotide
uguaucgauuccaggaaguuu

SEQ ID NO: 2656 - RNA, 21 nt, Artificial Sequence
  Description of Artificial Sequence: Synthetic oligonucleotide
uaguaucgauuccaggaaguu

SEQ ID NO: 2657 - RNA, 21 nt, Artificial Sequence
  Description of Artificial Sequence: Synthetic oligonucleotide
uuacaaguaucgauuccaguu

SEQ ID NO: 2658 - RNA, 21 nt, Artificial Sequence
  Description of Artificial Sequence: Synthetic oligonucleotide
uaauacaaguaucgauuccuu

SEQ ID NO: 2659 - RNA, 21 nt, Artificial Sequence
  Description of Artificial Sequence: Synthetic oligonucleotide
uaccuuuguagaaagcaucuu

SEQ ID NO: 2660 - RNA, 21 nt, Artificial Sequence
  Description of Artificial Sequence: Synthetic oligonucleotide
uucaccguucugcuuuucuuu

SEQ ID NO: 2661 - RNA, 21 nt, Artificial Sequence
  Description of Artificial Sequence: Synthetic oligonucleotide
uacuuucaccguucugcuuuu

SEQ ID NO: 2662 - RNA, 21 nt, Artificial Sequence
  Description of Artificial Sequence: Synthetic oligonucleotide
uuccaauguaucucccacuuu

SEQ ID NO: 2663 - RNA, 21 nt, Artificial Sequence
  Description of Artificial Sequence: Synthetic oligonucleotide
ugauccaauguaucucccauu

SEQ ID NO: 2664 - RNA, 19 nt, Artificial Sequence
  Description of Artificial Sequence: Synthetic oligonucleotide
uauaacauucuggagauac

SEQ ID NO: 2665 - RNA, 19 nt, Artificial Sequence
  Description of Artificial Sequence: Synthetic oligonucleotide
uguaucgauuccaggaagu

SEQ ID NO: 2666 - RNA, 19 nt, Artificial Sequence
  Description of Artificial Sequence: Synthetic oligonucleotide
uaguaucgauuccaggaag

SEQ ID NO: 2667 - RNA, 19 nt, Artificial Sequence
  Description of Artificial Sequence: Synthetic oligonucleotide
uuacaaguaucgauuccag

SEQ ID NO: 2668 - RNA, 19 nt, Artificial Sequence
  Description of Artificial Sequence: Synthetic oligonucleotide
uaauacaaguaucgauucc

SEQ ID NO: 2669 - RNA, 19 nt, Artificial Sequence
  Description of Artificial Sequence: Synthetic oligonucleotide
uaccuuuguagaaagcauc

SEQ ID NO: 2670 - RNA, 19 nt, Artificial Sequence
  Description of Artificial Sequence: Synthetic oligonucleotide
uucaccguucugcuuuucu

SEQ ID NO: 2671 - RNA, 19 nt, Artificial Sequence
  Description of Artificial Sequence: Synthetic oligonucleotide
uacuuucaccguucugcuu

SEQ ID NO: 2672 - RNA, 19 nt, Artificial Sequence
  Description of Artificial Sequence: Synthetic oligonucleotide
uuccaauguaucucccacu

SEQ ID NO: 2673 - RNA, 19 nt, Artificial Sequence
  Description of Artificial Sequence: Synthetic oligonucleotide
ugauccaauguaucuccca
